United States Patent Application Publication US 2022/0167576 A1 - sequence listing, part 5

SEQ ID NO: 30 - DNA, 35937250 bp, Oryza sativa (residues 8,455,825-10,569,780 of 35,937,250)
  misc_feature (5969519)..(5970518): n is a, c, g, or t
  misc_feature (13681864)..(13682863): n is a, c, g, or t
  misc_feature (13684155)..(13684254): n is a, c, g, or t
  misc_feature (18795366)..(18796365): n is a, c, g, or t
  misc_feature (24815509)..(24816508): n is a, c, g, or t
  misc_feature (35936251)..(35937250): n is a, c, g, or t
tctcggcgaggaggtcgtcgtcttccagcggccgcgggtgcgggtgcgccatcaccgggtttcggttccccgcgcttctccgcttaggtgggaagtggagactggagaatgtaggcagactgtgagactgggactgtgttgtttaggcgagtttacttccaaacttttttttcaaactttcaacttttttatcacattaaaatttttctacacacaaatttttaacttttccgtcacatcgttccaatttcaaccaaattttcaattttagtggaactaaaaccaaatagatagaaaaaatttaggccaaaaacgtcacatcaaatatttatatatatatatatggggtattaaatgtgggaaaaaaaatcaattgcacagtttgcatgtaaatcgcgagacgaatcttttaagcctaattacgtcatgatttaacaatgtgatgctacagtaaacatttgctaatgatagattaattaggcttaataaattcgtctcgcagtttacatgcggaatttgtaatttgttttgttattagtctatatttaatactttaaatgtgtgtccgtatactccaaaaactttacactcaaataactaaacacacccttagatgaggaaaatgttgagatatttaactatttgccacttttagatgtggcaattaactatttgcctctgaacccatatgtcatagacacatatggatccacatttcattgagataggggtggcaaatagttaaataccaaatttaaaagtggcaaatagttaaatgccccggaaaatgttagctcgaggtcctcctcttttattttagtttttaaatcgtactttgaacaatattacgcaaatcccattaacttttaaaacatttgtaaatgaggtccatcgacggtattgtttacggttttagctgaggtggctcttttgactaggtcttcgtcccatatgacatttgcatgacgcttacgtggcaattcaattcgataaaaatcgtggagctcatgtgtcagtttaaccaaaaaaaataattaaaaaacatggggccttacgcgggacccacatgtcatctcattctcattttctcttccctttccttcctctcttatgttatcccttccccactcctctctctctctcacacactcctctcaggctggttaatctcagcgcaaagacagtttgtgctgagttcacggtttatttcttgttaaagtttcttttactgtatagtttcacaataagttttttgaaaaggaccatttaaaaaaaaacgggaggggggagagagtaggaacaggggacccgtgggctggtctgtcgggacaagttcgcggcccatgaaatgaaatccggccattaggcccatcccagtcatggtgccctgtcttgcatgccatttgttcgaccgatggaatccagtgtcgcacgctaaatacctcttctgctcttcatccatccgatcactctgaatccaagtgaatctccggattaggatcggccgcgagttattttgctctgtgaaagttgcttggctgcgtatagcactcctcattcatcaacatcgtggtgaagagaaacgaggggctcaaaaatcaaaggcaaattttactacagtacatcgtggctttgcagttttaactgcaggacaccaaagtgactttggggtgaagacactttcaaaagttggatatttgctggtggacactggacccactaaaataataatttttggtttaagaggagggagaaatcgtgtgaaatgtatgaaatgtccttgggcccacatgtcagatttccatctctcttctctctctatcccctccttccacactggcacacagccatgcgacgggcttcagggggcaggaggagggttgtgacgagggggacagcggcagccaacggcctaggccttgccgggccagatcggcgtcgccgccacggagcccgcatcttgccaagaccttaagagtggcatttaaatgtcgttcacgaaatcaacacgacatgttgtttcttgtttataggataaattatatgaatatagccacatccactatcagggccggccctggccctatggagccgaggcgaccgccgggggcccatgatggtggggtggggggcataatggtggggggcaacacctaatactagtagtctagtacctcatccgatgttgagatcaatgatttttattcagaattaaaggtgatgaaagtgagtttgccagattcttcgatttccctaagattttgaagtttgttatggatgcagatttctatccaaatgtttcagttgcctatcgaattctcttaactttacctatgatggtagcttcagctgaaataagtttatcaaaattgaagttgttgaaaaactatttgagatcaactgtcgcaaataaggttaaatggcttggctatgtgctcaatcgagaaggatatcttggacactattgatcttaataccgttctttatgattttgcatcaagaaatacccgaagaagtatcttttcataggaagcaatggatatgacggggttctattcttcattaagttaataaataattatattagttccaagttacaaatatattgttattttggtcgattttatttcttgataattaccaggaatgttaaatttaatatatagatgtatttgttttcattttgcaagtaaaattagcgtctatatatatcaataaattttatatatagcttggagggcccatcgcgatgagttcgcctagggccctcaaaatcataggaccggccctgtccactatagtccataatggaatatccatggcatgaagtaggaaaattaagaagtttgtaacctttatttagtactgatatcgaacagaatcaccaccaagtgtcatacttgtggtgttttattttactctacgccgatactagttctcaattacattactctgaggtctcgctttcggactcattcgataatcctgggtagtattgttgttgaaatctaggagtgaaggcaccgtgctcttctcccctgttgttcttgaggcttcgggcttgctcccttgagatgcgatacgcattagcgactacatcaactggcaaggcacggaatactgagtttttccctgcaaggtggctgacgaaggcgttagcgtttgtcttgattgcgatatattggcatccttcacgctctgctttcttcaagacagcataatgttgcggaatgatcaataattgtcctgggcgaaggacaccatcaaacacagtctttccaaagttactaacgacttgaactcgagatcgcccttgaatcatatagaccaaactatgagcattgacgttccagaacggcgagagaatagcattctgtagaaatcagtagagaataatgttatataagcaacaaatcaaagatcttccaaaaaaaatgaagagaacaaaacggtgctataataaatacctggtataggtttactctggtagcgctcatttggatgaggttaaggatggggaacttctgactattgacacttgttatccttccggcacgtgggttgtatgaatcagcacgactaggattttcaatgtttactctcaccttgatcgtgcaaaagttctcctccaatccgttccatcgagaagatgtttgctgtcgttcactgtattgaacttgttgatattgatcttgtgcttgtgcttgttcttgctgttgtgtcaaagtcggtttcaacaattgaaggccattcttcacatgtatgatctctcctctttgatcattttggctctgtagcctctttgctgctactgcgttgatgcctaaagcctcacttagcatctcaacaccaaatccgctgaatatgttttgcccagagtgttgctcaattgagctaccatatacttgttgttgttgagcccgattgttgttgccggctaataggaactcctgaaatttttatcaatgaaaaatttaatgttttacgctatgaattgcattgtaagaacatatgaaaaacatagaaaattacaactttgatggaaatatttgttcaaaaaattaccttttgcctaggttcaagctgattggcgttgttgtttacgtcataaacatatacggcaacaataggtgcatcaccatcattgtagaaccaatgtgcaacaccagctgggagtgcaacaatgtctccttgcctaaattgatgaatcttttggtgctcatctctaaacttttggctctgactttggccttgagatgaaaattgttggaattgttgctggtaagtcgcagggcaaccggggaaggttaaacccatagaacctctccctaaaaattataatgttcacataaggtacatacaacattaatttgaccatggagatcataactactagttgcatcgatagagttctcgattatatttattaggatacaaaccttggatgatgtagaccacgccaggaatatttgtgtatcgaggtaccaaaaggccttgaggctgaatgacacgtcggatcacaaaagtacccgtgcactggaataattcattcttctcatcgaagtactcagtcaccccagcttctgacctcactttccgaagtggttcaaatgcttgtagtctatcaaatctacactccctaaaacttccttgccgaggactatgccatgggtttgtgctgggattaaatagctgggccatagaaccatggcataatagaagaacacaaaagtatatagaaaaccgagagaaaacggaactcgccatagctatttgtacttgcttatggaaacttaagctaattgatgtgagttcaaagacagaccaagctagtttatatagcaataaaaaagcatcttgggatacatggtgatatagtttgttgcacgtacagacaatatatggcttgtagtgttaaaacagtacaaaaggaaaggcaactttgcaagattgaactatacatttcatgactcagccatgacaaacttctggtgcttttggagtaatacaaatggagtttgttaaagaaatgtctatccatactcttaatatgtatctttgccttgtcattatatttgtttttgcaccataaagctcttatgcttgagaagatgagtctaactttaagatgataataacttgtaagcatgttgtcatttttgcgtagcaagctatatttgataatttaggtgttccttcaaaataacaaatttgtaggtttgttttcatttacttgacaattgataagtaacttgtatttttaaatgacatacttataactttgttgtcttgtaaaatataccggacaataaagcatattggtgtatgtaatttttccatgtcataagccttcttgcagtttattgactatataacttgcctattgatttttttaagtgttccttcaaaatagcaaatttgtaggtttgttgtcatttacttgatacactacaattgataagtaacttgtatttttaaatgacgtacttgtaactttgttgtcatgtaaaatatatcagacagtaaggcatattggtgtaagtaattttaccatgtcataagcctttttactgcttattgacccatataacttgcctatatatattatttaactatttgaaaaacacatattatgataattttacacatctgaccacggagagctgtgaggctacacgtgggcccgtgtcactcaaatccacccaggcgcacggatttgcttcccgtgcacctaggacggctccccgcgtgctcccgctctatgtgaatcgtgtttgcagacgagtggacccactcgggataccgcgcgggggaccgagtccactagccttgtgcactcgtcctaggccacatcctcgtccggtccactcggtcccccgttcgtcgtagctgctccgtcgtgtgttcgctcggctgtgcccacgcagcacgctgggccacacgccgccttcagcccaaaaaggcagaagccatcccctttttcctttttctttttccatttaattcaataatactttttttctttagacagagaatcaattaatcttagaaaatccatatctcttcaactgtctgttcgattgactctgttcaacttctaaaattcctcaaaaatcgagatctattcagtggcacacttagtactcactaatacgagcttttccttggtcgttttgttgagttatctcgttccacgtgtagcttcggagccagaagagtcctagtgcgcggaatacgaggaagaagctcaagatatcaagcaaggtaggtcacctttgattattttgagcccataatttgaaactaagtatttcatttctcaaaatgcacatctctaaattacacatgaaatgttggccgcagtttgcaatataaccaacaggccccacctacaattgctgcattaacctccttggtcgactacaatgctaggtctcagtattcgtgccctcaggtacggataccaatgaccctcctcaaaatttgaatgatcaactatgggtaaaacttgggtttacaaaatccctggaaaacccgacacacctgggtcggtgccttgaaaacaaatgagtttactaaactcgtatttcggtagaagtactggtggtatggttttctcgttcttgctcatatggaccgattcctttagaatttcatccaaccataacatgtgtgaccacatgggtgaattgtgacatgcctggctgagtaattagctaggtcaggcaaatcttgatgccaatggacaagtggatttgtcggggtggtgttggggaggaccccttggatttttcctggcacaacatggtttgggacctaacttgttgttggtctgtgggacccctccagttttcataaggtgtccttgtgtgggctttcgaaatgccttgtcgcgaaatcccttaagtcacaagacgtggctattttgcatgggctgggtaactcaggttagtggcgttgtgtaggtaaagtgtaccttctttgtagagattaacaaactgtttgaacagtcgtgctcacggtcatgggcggaagtgaggtgattccttagcatagttttggttgactactactttgtgaagttgttggtagcaagaatctgttttaaattgatatgtggctcttgggagcagccagactcggggagtcctcttatttgtttggcaaggagccacccatgcagatgcattaaatgaatacacttcactgctttggtcatgtgagatgcatcttctcacttgtgtagttgagaaccactcacttagtcgtttcaaaacctttatagaaaaaaaaaatctaaacatggaaataaccagcctttctctgaagcttgcattaaacacctaattcacatggtttgttgagtactagtatactcacccttgctctatataaatacaccccccaggcacaatttctcgatgaagaggagatggatccagctgatgagttcttccaggaacaagcaggcttcgagcggtattagggttttggcttagttccaaagtcatgcttgtggctttgtctagtctccgcttctgcctttttgtaatgcagttgtgaactcgggggttgttcgcagttccaacaatgattgtatccctactcataataacgaaacccatgtcgctgtgatattctatcttcctttgtactagctctatttcctgggactggtacatgctcacaagttaatatgaatctccttacattggttttcatttggagctagtttggggcgtgacacatggtatgctagaagaatatttctttggctaaaatttgcattcaccatacttgtgatatttttttaaaataagttcatcttagatggtcactgtaaatatataaatctagatggagacagttgcgaatatatgtgacatattttcggtgctatggaagatattttattagggaaagattataagtacataacttttcaaacaaaactcttgtgataaaagtgtgtgtggcacactatgaaccagcctagttttactgtaactaatttatactcccatcgttttttaatatacaatgtcattgacttttttacatacgtttgaccgttcgtcatcgaacataaaagatataagtccatgcttaaaaaaattaataaaaaagtcacaacaaaataaataacaattacataattttttaaataatattaattgtcaaacggatattaaaaagtcagcaatcttatatatattaaaaaaacgaatgtagtacttgtgttccttttgatcttaacggttggtttatgggataaatacatttattccattaggttcctacatatgtcccaaaggatatctaatcccttaattaactctgcctactggtggccttatggttccatgttgaatgccccgtgcaccaatgcccatgcctacgagcataaaacgttaaaaaaattaagattgaaatataaatcaaatatatattagaggcatccataagtatgaggaatttttatgtactaccccatctatgaattcagggacaactcagctttcagacaacattaggaatagataattaaacaaaaacatatctaccatcaaatgaaaagaacattcttcagcaaaatataaaatataatcaagtattttactattataatccaaataaattgattcaaaatagttttaaaaaaatcaataggcaagttatatagtcaataaactgtaagaaggcttatgacatggaaaaattacatacaccaatatgctttattgtccggtatattttacaagacaacaaagttataagtatgtcatttaaaaatacaagttacttatcaattgtcaagtaaatgaaaacaaacctacaaatttgttattttgaaggaacacctaaattatcaaatatagcttgccatgcaaaaatgacaacatgcttacaagttattatcatcttaaagttagactcatcttctcaagcataagagctttatggtgcgaaaataaatataatgacaaggcaaagatacatattaagagtatggatagacatttctttaacaaactccatttgtattacaccaaaagcaccagaagtttgtcatggctgagtcatgaaatgtatagttcaatcttgcaaagttgcctttccttttgtacagttttaacactacaagccatatattgtctgtacgtgcaacaaactatatcaccatgtatcccaagatgcttttttattgctatataaactagcttggtctgtctttgaactcacatcaattagcttaagtttccataagcaagtacaaatagctatggcgagttccgttttctctcggttttctatatacttttgtgttcttctattatgccatggttctatggcccagctatttaatcccagcacaaacccatggcatagtcctcggcaaggaagttttagggagtgtagatttgatagactacaagcatttgaaccacttcggaaagtgaggtcagaagctggggtgactgagtacttcgatgagaagaatgaattattccagtgcacgggtacttttgtgatccgacgtgtcattcagcctcaaggccttttggtacctcgatacacaaatattcctggcgtggtctacatcatccaaggtttgtatcctaataaatataatcgagaactctatcgatgcaactagtagttatgatctccatggtcaaattaatgttgtatgtaccttatgtgaacattataatttttagggagaggttctatgggtttaaccttccccggttgccctgcgacttaccagcaacaattccaacaattttcatctcaaggccaaagtcagagccaaaagtttagagatgagcaccaaaagattcatcaatttaggcaaggagacattgttgcactcccagctggtgttgcacattggttctacaatgatggtgatgcacctattgttgccgtatatgtttatgacgtaaacaacaacgccaatcagcttgaacctaggcaaaaggtaattttttgaacaaatatttccatcaaagttgtaattttctatgtttttcatatgttcttacaatgcaattcatagcgtaaaacattaaatttttcattgataaaaatttcaggagttcctattagccggcaacaacaatcgggctcaacaacaacaagtatatggtagctcaattgagcaacactctgggcaaaacatattcagcggatttggtgttgagatgctaagtgaggctttaggcatcaacgcagtagcagcaaagaggctacagagccaaaatgatcaaagaggagagatcatacatgtgaagaatggccttcaattgttgaaaccgactttgacacaacagcaagaacaagcacaagcacaagatcaatatcaacaagttcaatacagtgaacgacagcaaacatcttctcgatggaacggattggaggagaacttttgcacgatcaaggtgagagtaaacattgaaaatcctagtcgtgctgattcatacaacccacgtgccggaaggataacaagtgtcaatagtcagaagttccccatccttaacctcatccaaatgagcgctaccagagtaaacctataccaggtatttattatagcaccgttttgttctcttcattttttttggaagatctttgatttgttgcttatataacattattctctactgatttctacagaatgctattctctcgccgttctggaacgtcaatgctcatagtttggtctatatgattcaagggcgatctcgagttcaagtcgttagtaactttggaaagactgtgtttgatggtgtccttcgcccaggacaattattgatcattccgcaacattatgctgtcttgaagaaagcagagcgtgaaggatgccaatatatcgcaatcaagacaaacgctaacgccttcgtcagccaccttgcagggaaaaactcagtattccgtgccttgccagttgatgtagtcgctaatgcgtatcgcatctcaagggagcaagcccgaagcctcaagaacaacaggggagaagagcacggtgccttcactcctagatttcaacaacaatactacccaggattatcgaatgagtccgaaagcgagacctcagagtaatgtaattgagaactagtatcggcgtagagtaaaataaaacaccacaagtatgacacttggtggtgattctgttcgatatcagtactaaataaaggttacaaacttcttaattttcctacttcatgccatggatattccattatggactatagtggacagggccggtcctatgattttgagggccctaggcgaactcatcgcgatgggccctccaagctatatataaaatttattgatatatatagacgctaattttacttgcaaaacgaaaacaaatacatctatatattaaatttaacattcctggtaattatcaagaaataaaatcgaccaaaataacaatatatttgtaacttggaactaatatcattatttattaacttaatgaagaatagaaccccgtcatatccattgcttcctatgaaaagatacttcttcgggtatttcttaatgcaaaatcataaagaacggtattaagatcaatagtgtccaagatatccttctcgattgagcacatagccaagccatttaacctttcttgcgacagttgatctcaaatttcttaattttcctacttcatgccatggatattccattatggactatagtggatgtggctatattcatataatttatcctataaacaataaacaacatgtcgtgttgatttcgtggacgacatttaaatgccacagccacggagtaaacacatgaagcaacaccgaacatttaaattagcaatctggtagcggtgattgagatgggtataccacaatacttgataaatgcttaagaaacaagtaggccggtgataaatccactcgttaaccgtgcttaattaaattaccaatgagaatgttggtgcatatgtgtacttgggcaccaaaaattgaacaatggtaaatgtacgctcgaaccttgtcaaggtacaccaatatataagccgtttgccttgttgatccaatggctaaggttgtgtttgggaggaggggaaataagaacattgagaagatacgcacaacaaggtgagctattagcgcatgattaattgagtattaattatttcaaacttgaaaaatatattagtatgatttctaaagcaacttttctattgaaacttttatagaaaatgtatcgtttagcagtttcagaaacatgtgcatgtaaaacgaaatatgattaatgtatatgtaatatgttcagttgtttcaaaataaaagtgacaaattagtgtgtatgattttctcatgcgatgcactagtattggtattgctaatgcccttacaaataaggttttgcaagcagcacttcaccccggagtatgctggtgtatcatatttatcccaaggataaactactacctctaattatatgtattttcatattaatccattagagttcaccctttcctcttttacatatattctagttgatgtgactagtaggaattaaaccctaaaccctaaaccctgacatgcttgggaccctaagcacccaactccaaatcaaactttctcccaaggtgttgatgaaaaaatcgaacataccggcctgggagatctgcttagctcctgtgcaggtccaaatcttagtgagatgcgggcgtgccagtcagtttgatcctgcaactaacaagatatgcaaatagtagatcaaaacagccaatcggctgacaagccgatggagtagttcctgccgatagccgataatagccaatgctgataccagccgatagcgatagggtttaagcaatcggctatatgtccaatgtagatatgatataaaggcaattggctgttgataataaaatataactataatatagtctagtataaaccaatcggctagcattgatatgatataataagcactgatccgaaggttaaagcatacatcggtcggaggtctgatgtcatgaaatccacaagattagattaaacagtgaaacctttgttgtcatcggctaaatccaacttatatgtatatgcaatccttatgagccgatgcaacgtccagataactcactggctgaaaccccgatgaaacccttattaggagtcaaagagcaggctagagattatggttctaagtacgacttagtagatcaaacttaactgatgcagtactaaatatgaaaagaaacataatatctagacgaccaagccgttgactgagttttcagggtggtagatgtctaagctaatctaatctagcaacgcgatttagccgataccggcagaaaccctaaaacgagaagcagccgatagagctaaattgatatgctaagactagattaacagagacatatgataaataggtaggcaaatatatcatccaaaccagagcaatccaagaggtcgaatgtcctgatgcagccttgaacgacgccaacgtagacgatacaattgcctggaccggcggaacattggacttatcccttcgccggagatcgaagacgatgcagccctgcgtcgggtgccaagttttgccggaacataaaaacaaaagtagaagtaaaagggtggcgatgcgccgaattgtattgatcgtagcaatagattacatagaccccgggtgtacatatttatacccatgggttgatacaagtccttgtcggacaagaaagaaactttcctaaagataaaaggaaaagataaagtccttataggacactaaacacactttcctaaagataaaaggaaactaacaaactattcctaattaatagataacttgccatgccgcattctctttgaactcagtctctggataagcttcttttagtagatcaatttccttaaccgaatatagcaagaatccggcaactgacgacttgacaattctcatcggctaatctcaggacttcgaagccgatgctgactctcagccgatgactactccgggcttaccaaatttcactgttaacacaaggctagggttggcacgtgacatttgaggtgaattgcggccaccctctggagctgggaaacagatggtgtggtgccaagctaccccttgtccacaatacggggaacccttgttaccatatcaccgacatattggatttcattttgggattctctgggcatgctctataggtttctatgctgcactgatcatcatatgagtttagtgttgtgatgtaccagctcatcaagagaaattacaccattcaattatttaatccggacacattatccccatcctcctgttttaaggtggtttcggtcccacttgtcccatctggcactccaatatggcgaatgatgtggtaagatattggtacagcccacttgtcattgacctccatttttttcctcatcactttgctggcttgatctaggggcgaggcaagaggagatggagagcgccgagctcgagcagcggaggagagaaaacttgaggaggaagctctcggggagcggcaacactcaaggaggagcggaacttgcggcagcgatgacactcgggaggccatccgtcggctatgaccctcaagaaggagagtaacttgcggtagtggtggtggtgcttggggaggcacggcggcggcgagcgtggagcttgacctcgatgaggcagcagtggcagatgtggagcttagcaaaggcagaagtggaactagaggcataggcagtgctcgagatcaacgagacaatggcggatgatgcggttgatgagtaggacatggaggagatgcgaggcgcacggtcctgtggacctcgagctctgcatccactttgtcagactctacaacctcctcgcatcaaaggtcaaggaggagttgcatggcaactgccgatcttggggaggatggaagtgtgagcatatgagcttggggagaagaggaagaagcgagaaggtcagggaggagagcaagatcccatcaaatccgtggaccttgacgaagctcggcgagtagtctttagcagcggtgacctgtgctcctctgccacaccacggaccaacacatcgaccattccgcctccacctacatcccttgacggagctcggattctacccctttcagcccctcagccatgatgccacctcaacatcttcgccacttttgctaagcgcctccgcagcctcaacagagcctcccgagccccgttgccttcaaatatagtgttggtagaggatgatgggtgcagcccaccaagcttattagaatgccaattgttaaaccacatataagtgtatgacaccgaggactaaaaccattactaatacattgttagaggggtaatcctataatactatacaagtgatccccacttagtgtagttattagcaatttcctgagcgattgttaagccacgtcatccctttgattctcccatggctcccatgcgattgtgtgcagcagtactcccatggctctaccacacaatccccaccgcacgtcagctaggggaagcgacggtctggagtgccgcctcactcctcttcctctccctttgttgccacacctcctggaaaccgtcgacacccaccaacaagtagttttcgtggctgccatgaagacattaactctgtgcgcctgtaacgtcgtgccaaaatcatcatcgtcctttacttattaccggtgaaacgcatctaaaatccacacaaactccatgccttttaatcgatgttggactcctagagccattcaaaggcttccccaatgttagccttggagtgggagagtttggttgttttgggagtcatcctttctacggaatgacggttgaaattgattactcatgtcctcgataactgctgtattcgtttgagaacttcagctgccttatcgttagattaagtcaatccgtgctagcactggacataagctttattgccttcttgatttgaggtaggtaatttaatttttcatatttattcattctttgttttgatcgttggttggctcagattgacctttatttcaccagtgattgaagaggttcaacattttccagtgattgaagctctggtgacttttgggaggtcagcctcttttttttctagctcatacattcttatctttcaaattctcaaggcacatatcttttctctaatggcaaggaagattatgatcccaaattttttatctaccaatttgatttctttgtttcgaatgagaattatgttggcctttgtataaattaattaatgagatgctggtttcataacattttaaggatccactctatttttttccaatgtcttttttcagcatcacttcttttcattctaatgatgtataatggcatcgagtaaattgattgctttctcaccatctagaggtgcttctggtggaatcttagtggtttgggtttccaaagtctttttaggaactccaggtgatataaacagcttttcggtcacagtaaattttgtatcaaggcaatcttctgatgcttggaccctgacttgcatttatggcccatgcaatggcccagaatgttccctctttgttcttggcttaaaatcttttgggccgactgaaaacagacttttactgggtgattttaatttctatacatctgttgatgacagaaataggccaggagctggtatgaatgacattatcatcttcaatgacattattagttctcggggtctgttgaaaatccccttgaagggtagaaatttcacttggagtaatatgtagaataatcccctgttggagagactcgattgggttttcacaagcccctcttggaccttggccttccccaacaccattgtgcttcctctagctcgcaatatttctgatcatgttccttgtgtagttaaaatcgatacatacagaaatcccgaagtccccaatttttagatttgaaaactactggcttgaaatggagggttttttttatcttgtcagcagggtttggtctatggatcctggctatgaggacccagctaagtgtatcagttttaagctgaaagttgaggaagagtttgctgaaatggagtaagaatttatcaaggttaactgctctcctggttaactgtaatgttgtgctcaactttcttgacttaatagaagaacataggcctttgggtatttatgagtggaatttcaaagaaattatcaagctgcaaactattaaacttcttgagtttaaaaagctctattggaaaaaaaaagatgcatgaatagatggatgctgttgggagaggagaatactaagttttttcaatcaattgccacagagagattcagattgaattccatctctcaaatttatgatcactctggtcaagtggttactttgcatgaccagaaggctaatatgttttttcaaagctttgagagcagaatggggatttctctctctccttcaatgagctttaatctgatggagctttttcctaaccctgtaattttggattgtttggtggattacttctctacccaagaagttgacagcttaattaagataattccaccagacaaagctcctggcccaaatggttataatgggttttttcttaagaaatgttggcccatcatttctcaggatttttataggttgtcagcacactttcatgtgtgctatactgatctgcaaccgcttaatagctcatttataaccttagtacccaaaaagccctctccagaaactgttaatgatttcaagcctatctctctgatgggtatcagtttgaaagtgctaaacaaattaatggcagatcatctgcagggtgtaatgctcaaggttgttcaagaaaatcaatatggatttatcaaaggcaaaacaatccaggattgtttggcatggtcttttgagtacatccaccaatgccatcaatcaaagagagagataattctgttgaagctggactttgaaaaatcttttgattctattgagcattatgcccttatttctatcatgcaaagcatgggttttagtgacaaatggttgcagtgggttcacatgatttttacttcagcacatacctctgttctgcttaatggtgttcctggaaattctttcaaatgtaggagaggggtttgacagggggattctcattccccatgctttttgttcttggtgctgagttgttacagagtgtgattaacagagcatgctctctgggtctgttgtccaagccaataaatgaacaaaatggaaagggtttcccagtgattcagtatgcagatgatactttggttcttttttaagcatctcagaaggaagtgttttgtttcaaggcattgctcaattcttttgaacagtcaactagtctcaaagtgaattatcataagtcgagtttatacccaattaatctgtcccatgagaacactgaactttttgctggtttgcttgggtgttccattggagcaatgcctttcacctacctgggtctaccaatgggaacaactagggcaaagatagtgaattttgcccccttggtagacagagttgagagaagatggacagctagttctcattttttttaaaacaaggtggaaggctcactttgatcaactctgttttatcttcaattccaacttactacatgtgctccttgcaattacctgtttctgtagtcaaagctattgatactgcaaggaaaaattgccattggagaggaaacaatccaagctctactagaagatcccttgcttcatgggatttggtgtgcggaccaaaggacaaaggaggtttaggagtcattaacttgagaattcagaatacaacccttttgctaaagcactttgtgaagttttataaaggacaagatctgccttgggttcaattgatctagaatacatactatggatctaaagttcctcatttgatttggaataaagggtctttctggtggagggatatagttgctttgttagatatcttcaggggaatttcaaaatgctctgtcaggacaggttcttcaacccttttttgggatgacctttggaatgatgaggttaggagttcgacttccccaaacttttacaatgttgctctcgataggatgcaatctgtgcaacaattgtgcacactgccattggaagattgtttcatgctgtcactgagtacccacgcttatgaagagtttgttagtctggaggaagatatttcctctcttcatttacaggatggcaagggagatgattggtctttcctgtggaattctgataaatacactactaagaaattctacaaactcactttcttgaatgtgcaagcgcagaggccttttgtctggatttggaaaacacgatgcgttatgaagattaaagtctttgcttggctcctcttcagtgatagacttaacacaagagatatgcttgatcgtcggcactgtgcaaaggagaatgatgatctcacttgggagctatgtgtgaataatttgagggaaacaagagagcatctcttcctcttttgtcctttcagtcaaagatgttggcagcatttgggaatcttgtgggattctaatctcaatttctttcaaaagattgtttcggctcgtatgcagttcaggcaaaagggtttcttggaaatcttctttattgctgcttagcacatttggaagcagagaaatgggaaaatctttcggaacgagtaagtttttttttccttctctcctcttttgtaatttgtaaatattttgagtttttatgaaaattacactacgaggcaaagccctggtagtaatttaagtcaaaaaaaaaaggaagagtgcaagtatgcaactaaaatacatctgcaacaatacacaggtaattgattaatagcctttcgagaacttgtgttaaccaacttttagtattgttgctgtccttgagtatcttatgaactatttatgctgttggatattaattccttccctttactgtttcacagcatcaaaggttgcattttgcatatttctttagttcataaaaaggtaagctctgttaaggtataaatatataatacacctaatagtgtgtactatatatatatatatatatatatatatatatatatattaccgtgtaaggtaaaatggatggttttcgaatggtaacggtcattgaattacaccttcttttctgaaagtacaaaccattcactatatattgtagtatatcaacgttttttttttgtcattgctttacagtttgcagatactccctccagttccatattaattgacgttttggacaagtttgaggtcaaatttttataacttagactatcgataactttaaaaatatttagtttaaaggaactagaacaacatatatagatttgtcttttaaagtactataataaaagtaaacatatatttatttattatatatattataatagaaaaataaggtcaaagatgtatcttgtagaccgtgtcattgtccaaaacatcaattaaaatgaaaccagatggagtatttgtatgtattttcaggaatttttgcacctgttgctcaattgatcaagttaccactgcctgctgttgtcagacgacttatcttatcaagttgataggtaggagtacttagggtgagtttgagagataggagattgagaagattgggaagatacgtaaaacgaagtgagctattagcgcatgattaattgagtataaactattttaaattttaaaaaatggattaatatgattttttaaagcaactttcctatagaatttttttgccaaaaatgcaccgtttagtagtttgggaagcatacgcgcggactacaatgtgctttctcatcctaactcaccggaacgaatgctcccttagttagtcgatgtacttataccctacgtcaaaaaaaatttcttataccagagttaacgggggttttagaaatagatcgataagtaggggaaaaacctgataatcgacctgttccattctcggctttgcatctttcatttgcttgctaaattattttatattttcatcactgtacaaatttatcacatatcttacatacacaaatttctacagtaaagcgtgtgggagtctagttcatactgttttaaaagctcagaggtgtaaaacatctcgcattagagcactttatggtttaaattgaattttcaggacagttgaggggtaaatcggacttaaccctaaaaagttaaaagagaggaggtgcttgtttaataactggcgaatctcctaaaattttggtgacccatgaaaaattgttgccgccagaacaggacaaccgacaagtaattgatgcaaaatattcctcttcttttggatgagacacattaagccataatgcaagatgacatgcaattgcaataccgaatcgggtagtgcttacaatacagcatagcacacattgtaatgtgagcatgatcatgcgattcctgctgagataattggcctatttcattgttaggtttcacgtcggttatggcaggtatgtcggattgtctggcaatcaactagatctatagatcatgcatagcaaattgcccttaattttgatcaaaacaagcgcaccgtgatggaatcctatcttactataaagttatcccccactaacttcttaagcttaacatgcaaagatgccatatcatcatccactaacaagatgccacatcatcatccattaattaacaaggtgcaacatcatcatccactaataatcatcacatttaaacattatgcaaacatgctatatcttttatagtttttataatttaagagcttttccaatacaaacatgtgaaattatcatccaacataattcacataatgtttcaatgtatatctttttatgttttatgatatcctatatacttatatagttcattttcacttagtgattaaatgattaatctatggtccaaattatatttctcctttttttctctaattaagttatatcacatcaattgttttatcctttagatgattaatctacggtccaaattatctccctacttttcttctttcataaagtcataacaccttactttttacgtttgcatcaccattgtacatactaattaaatttaaattatcataaaccacattaatttacttaatctgatgttttctagctattttacacattattttttttattgttatcatactaaattctcgcaacaatgcgcggggtttcacctagttaatgtaataagcatttccatcatagagtggctttgtaccttgattttatagaattttcatatgaattaatttagctcccacaaaatactctaaatcggctatgtatagtttggatgtagatccgggttcttaattattttcaaaaattaaaaatactctaaaatcctacattaatcccgaaatatatatattccctgggttgatttttatagggcgtgatttgatttggctggtttccacaatggactttgacttggtttttaaaatatgcccatgaactttgatgctatagctaaaagagcgcgtcaaatcttcttatgctataaactaattttcgcatgaaaaagcacctgagtgttcagtatcaaatcccataaaaaaacaaaccggcccattggtatgacattttgtcctgtccatgacaagtgacaagaaaagttgcttgctttttttgctttggccctttgatctttagcgttgtcaaacattttgtcaaaaagaacactttcattatagttcaaaggtaatgtgtatgtcaaaaagggaaaggacagacggccttaaccggccttatccagcgagcgcagggaattagtggaatgttatgatagaacaagaaattaattgacactacttgatgcgttttaacctttttttgtaattgaaattgaagcgttttaacttgaagtgatgcactctcaacatacactcccatgtcttacctgattgagttagaaccatgaagagatcatatatacatgcaagcaattttaactctctttttttttaggaaagcaattttaacttctgaaacaacaacaaaataaacttcaaacgttttctcttttcaattatactcctaaaactaaaagacacacatacacatacatcgatcagtacatcaacacaccaaactctaaatgctccgctgtaaaatgttgagagttaggtcagcttgtaaatctgccaaaggggaaaagaagaaagaacattgtatatgctccgtatggtgcctgcacgtaatacttctgcttgtgaataaaaacagtataatttgggctctttttgtagtatatactacaggatgaacacattttttaaaaaaaatatatacttgtgaatcaaaaaaatgaaaccagtacgtaattgacaagtcaagcagcactgccgtttggactataaatagacgtttccaggccagcttaaacctctacataaacatgtatcaacaccatcactaattaccagcgccggacagatgaaactaataaccctctcgtgtctctgcctctgcctcctcctcctcctcgtcaccggctcgtcctctcccgtctccgtctccgtctccggcgaccgctgcccagtgctccatcaccatcgccggcttcacgacatggtcgccgccgccgtcgtcagtcaacccccgccgcggccgccgccgccagctgcgccggccgcggcgaggactagcggcacggcggtcgaaacagtattgccgcggcagcgagatgatggagaagagattgacgagacggtttacgaggggtccaagaggctcagccccggggggcccaaccctcagcatcactgagctatgatcagttcgtcgtcgacgatgagggccagctagcagcatctgcatatcagattcgggaaacaatatcaaaagcatacgagtttatagagtgattaataggcttctttcttaatttatatctgtcggctacttgttttagtctccctgaagtgagttccatctgctcagttaattacagtaaatgttttgatctttcaaaaaaataatgataactagtatagtactatatgtattttgtgctagcttttgcttttcaataccctaaaagctggttcatagaggaaagagcgtgcagcatggggattctgtgtgtatatgcactgctgtttgtaagaccgacgcattaataaatgttccaacaattggtatcaacgtgttgaatttaagggccacatctttttttcctgtaacgtatatgctgataccaaaaattttaaattttttaaagttgattttaagtttttttataatagtttctcttttaacattgacgtttaaatcattagtttttattcataaattattttttatcactaatacgacgtttggtttattatccataattggccaaacgatggcatcctaagttagccctgatataaacacatttctttttagtgtgttacagtgactagactagatctaaactgtcaggttatggataccacatacctaatagtaattgactaaatctcggcaggacccaccacataccatgtcttatacagaaacaaccttcggatacaggagaaattccgtataaggaaggatgaataaagttctacatgaaaacgacaaggactactcggattgtatccatattggtttccctaattctacttggacaagggaacacctatgggtataaatacaagaacccctaggaggagaggggacacggaacaatagatcaagacaaaaaatcaacatacaagccaacatacgctaagacaagacgtcagatatcgacttcagatataggcatggctagtcccctacggtgcctatggctaccatcaggagagatatagcactgtctttgatctcgccggatgcggattcgaggaggaaggctaccctgttgtcgactacgagtcaatactacagatcgccaaatcgacaacagttagataggctaccccaaatattgtactggtgtgattatggtgaataagagcaataccggcttcggccaacaggagtagagttattacctgacaattcaggggcccgaacctatataaaaatcctcgtccccatctcttttactacaatattgcatatatcctagcaccaacgatccccatactatgcaaataccggaatcacaacatcaaacgtcgacagtggcgcgccaggtaagggatcttttggtgcttcaaggtttcgacgagatgggtttaagagatggattctctgacagcatactactcgataacttcggctatggaggatctaacttgaccagagtacgtgcctcgacaagatcggaaccatcgtcgtcaacaacttggcctatcgagatcattcaagcctcaagctccgcggcgtaccaaaagatgtcagatcacatgatatcgaacgagtacgcaacaagataattaggagattgattttttaaattaatctactaatttcgtagatacatccggcatgtatctacaaaggtacgcaatattttatatgcaatttgtcatgcctatttctagattgtacaacattgtcagatcaataattttttatgtttacctagagcatgttttttatacaatatctgttgtgcgagtgttcctgatgttaaaccgactacggtttaatgctgggggctcgctctattttcttctgtataaatcatgcttgtttacggtttacataatgcttgatatttaatctgctcgttatatcctgataatactagaagatccatgcattttttttgagtacatactcgatattatctgctatatgtcttgccttctagaaaatatttttcaggaacaattgagcactcgagtaggttgtggtcgagtacaccccattatcgagaacgatctcgacaaatacagagtcgtcacgcccaacctgccaacaaagaccgacgacctatctcatagcaccggccatggctggactattcgagaaaaggttgttaacggataattcctcacgaacgtcatcggcttgatcacccgacatgattgcgaacggacatccagatatgctataagttgggtatgtgagtcatgctggccacatgagatgcacatgtaataaaccaactctagcacctccattggtgtttgagagataattctactcgctcgctggttctcgaaccagtaaaccgtagcaatctctcgcaccacagcttccattggcgttcgagagataattctactcgctcgctggttctcgaacctgtaaaccgtagcaatctctcgcaccgcagcttccattggtgttcaagagataattctacccgctcgctggttctcgaaccagtaaaccgtagcaatctctcgcaccgtagcttccattagtgtttgaaagataagtctactcgctcgctggttctcgaaccagtaaaaggtagcaatctctcgcaccgcagcttccgttggtgttcgagagataagtctactcgctcgctggttctcgaaccagtaaatcatagcaatctctcgcaccgcagcttcctttggcgttcgagagataattctacccgcgggttctcaaaccagtaaatcgtagcaatctttcgcgccttaacttcaagtggtcgagttacgactactacctggtcctcgaccagtggtctagcgattctcccactacctctactttaagtggtcgagttacgactactacctggtcctcgaccagaggtgtagcgattctcccattacctctctcctgacaaagttgatatcaggtacacaatatcgccaagtgttttatccagagatcccttaccacgacggcacctaaagttgaaacctatcctcatgtccctttatgccgtcctgacaaggcctctgaggaacctaagggaacttcggctggggacacccagagcggataaggccttgtcggatcatgtagagacaaacgaccatgtaagatctggtcatgtaagagttctcgccgtgcgtattaaccaagccgtgtaatcggaaattgagttttccaacttcacggctgggggctatggtcagtgctttttcaaccaagggaggtcaagggtccaagagccttatcctccgagaacgattctccgacgacaaggctgggggctaggaagagtgtatgactcaacaaactgactgatcgaagtcggaaaaagagaaaacgctcatatacaaaacattggtttgtaaatttaatttatttccagttttccatacatattgtaacatgtcaccctttgagcgttcgctcggaggctatttctatcaaatattcttttctaagtattgatttcaggaaaattctattcggtattatcgaagactccatgtctctatggttctataccaagatcgactaaggcgagtacgacaaatgttgacaaggctctgtcgcagattctgcgctttctcgatcacttgagaacggttggtggatctcgacaaggaatacggaatgaagagatggtgtacccgccgagataaaatttcttgacttcaatccaaattctcgattacagcaagacaggagacttagtcgtatgctctgtactttcttggttgacatcaggagattgactcagacaaaccctataggtgcccgcacgaggctgataagggaagtctaacgttatctctaaactcaccgagaacggtcgcgtgagctcgataacagttactccaaggtctgcggttgagaatatgaattcgttcatttgcattgaagtcgggggggctactgtcagggttatggataccacatacttaatagtagttgactaaatctcggcaggacccaccacataccatgtattatacggaaacaaccttcggatacaggaggaattccgcataaggaaggatgaatagagttctacatggaaacgacaaggactactcagattgtatccatattggttttcctagttctacttggacaaggggacacctatgggtataaattcaagaccccctaggaggagaggggacacggaacaatagatcaagacagaagatcaacatacaagccaacatacgctaagacaagacgccagatattgacttcagagataggcatggctagtcccctatggtgcctatggctaccatcaggagagacatagcgctgtctctgatctcgccggatgcggattcgaggaggaaggctaccctgttgtcgactacgagtcaatactacagatcgccaaatcgacaacagttagataggctaccccaaatactgtactggtgtgattatggtgaataagagcaataccggcttcggccaacaggagtagggttattacatgataattcaggggcccgaacctgtataaaaatcctcgtccccatctcttttactacaatgtcgcatatatcctagcaccaacgatacccatactatgcaaataccagaatcgcgacatcaaacgtcgacacaaaccacttaatcatgcgttgttacaaatggatgggtcgaaattcagtttcactcaactagctaggcttcatgtgaagggacaagttcgtttcagttttttcttgttcacaattccaaacaaatgcttgtttaccatcaatgggccaagcactgtcccctaattgaggctgtgttcttagtgatggttgggaaccctcaccttcgatacagaaaacagagcaatggattaatacgtgattaattaactattagcttaaaaatctttaaaatgaattaatatgatttttttaaagtaacttttctatagaaaatttttacaacacacgcaccgtttagcagtttgaaaagcgtgcgcgcggtaaatgagatagtgaggttgggaacttagacttaaggccttgtttagtttcaaattttttcttcaaacttccaacttttccatcacatcaaaattttcccgcacacataaacttccaacttttccatcacatcgttccaatttcaaccaaactttcaattttgacatgaactaaacacacgctaagaacacactctaatttgctacaccagtcaccactattcaacccaaatcccaactaatgggattttttttcctttttgagtgcctcttctttctgtaattttgatcactgtcactttgtcaggtctacaacgggctgtggcttaggccgagtttagttccaaactttttattcaaactttcaactttttcatcacatcaaaactttcctacacacaaacttccaacttttttatcacatcaaaactttcctacacacacaaacttccaacttttccatcacatcgttctaatttcaaccaaactttcaattttagcgtgaactaaacacacccttagtcaaagttgttgtcgagatgggccagattaaacttcagcgcttttccatgcttacgttatactcctttcatttcaaatttcttatcattcgaagttcgttcgagtcagacatctgaaatctttgaccatcgatttctataaattcatatagcttatcatcataagatttatatttttaatttatcatgcaaaatactttcataatatgtaattcacatgttatactatatggatttgtatatatcaatgatcaaagataagaaatatttggcttaaaacaaaagtaactttaagtagagggaacattcgaataggtgtacttgacacccgatccaatttcgagtcaataagcataatccaattatagttcttactcaaagcccaaacacctaaactttacgaacgtcaactctaatccccaatctttattgaatttattgctggtcttaaatacaattaagataagaaaaataattatccgaaacgaagacatgcctatagagaaaaataactcggattgtaaatatcataatgtcaaatataatgtaacatcatagtcgacgattgattggaagtatggaaagatgggatgcattggtcaatattgaaactgcaaagccatttaatttggacgcgactagaccgagaccggtctcgcgatagtcctatcacgcgacatgcgcccctgccagaaaaagcaaccacgtgaacgcgcgcccctgccaaaaaaggaaagcccgcgcgtgcaccacggttgcacggctctcgcttcgcgtggtatagctggcgtgggcccagctaggacagagcgctgcgcgcctccttcccccctccaacccatcaagtccggacaactggcagcgtcaatccccacgcagccgccatggcggaaaaaaatcagaaaaaaagcacgaacaaggggaggaggacgaaaccatcaactcggaggaggagaagaaagtaaagtagatccaaaaaaatatatcacaggtacacatgaagttcatcctctgtttttttgagatccatccaaaaaaatcatagaaactaacctagaatctttgagatcttttctgtcttctctgataaacatattctatgaaactgtgctgcaattttgtaagaaatgagttgtaatgttgtttcctgtcttccatcttgattaatgtcctccctcatacctccaaatttcctttgtatgtgctgctaggaaaaaaagttggagcaaaaggcatgagtagtgatgtttcaaaaatctcagagcaattttaacagaaacttacttctaacacttcagtaaattacttcctaggaacttgcaagttactttcacataaagttgaattcacattccatagtaggctctcagagcaattttaacagaaacttacttctaactagggatgaaaacggtcggaaacgatcggaaaacagtctcaaccatttccgtaaccatatttttctcggaaatgaaatcggaaacggtaaatttggaaacgaaaacgatatcggaaatatcggaaaacctgaaacggaacaatacggacggaaacatgtcggtacagatcggaaacaggtaacaaatacggatacattaaactataaaaacatatatttaactttacataagtatgttatatgtatacataaattcaagcttatactatataaattataaattaacttcattttagccatgtacaaaagttagagatttgattgaagagtcagtcaatatgtaagctgcgggtcaagtatagacatgctctataaatatcgacatatttagaatatggtaattaccatattataagaaacggtaatttccacaagaatacggtaaatacggaaacgatcggtataacagcaaaaccatttccgttttcatttccatattttttaccatttccatttttgtttcggtcgattatcatttccatatggctcggccggtagaaagtcgaaaacgaacgccggtcggccggtaattaccgttaccgttttcacccctacttctaacacttcactaagagttacaccttcttaattcattttgtaccttgtatgtgcacccaacatgatgcgttccccctagttgcctcctcgctttctcttctagtactgcatcaaaacaaaattgtgaaaaaaaacataactatagccactgatgtcaaattgagaaaaaattgcttcctataggcatgtaactgtaaatgtctaaaaagttactgtcctatttcatggtatttacttccaaaactgcactgacttacttccaaaaattgacttacttccaaaaattgcactgacttactttccaaaatgcactgacttaattccaaaattacactgacttactcccaaactacactgacttactcccaaactacactgacttacttccaaaaaaaaggtattgtactgtaagttacttctagaacatgctaagttatttttgacaacagatgaagttacttctagaacatgttaagttacttctaggaaaatacagataaaagtcatatgattcaatcctttagcaaaaaaaaagtctagtgcattaaaaaaaggcaaaaacacttccacttggattttacaagttttctaacatgtagtgcaattgtatggggacatagtcatactccttctgaagcaaaccaaaacttcattcaatactggattgcaacatcataaatctggattgatttcgaaaaactggttgcatttcatacttctaccataaaaaggattatgggtacatagaacaaggatagacatgcaatctcacataatgtgacaggaattagttaaccaaattttattcaatactggatcattctgatttactaaccatccggttataactataggtagtacacatgtccaagtccatattcaacatcaaaaataccgtttcaaaaaaagtaagtgttaagttactttttatggaatattaagttacttctaaaactagttaagttacttctagaaaaatacagataaaagtctagtgcagcagcataaaaaaagtgtagtgcagtaaataaaaaaagcaaaaacacaggttcaagggtagaaagatagacggttgtttcaatacctttgttctactcctttttggaggaggttgtgttgcatcatctccaccgtgatctctcttcttcccacgttgtgatacaccccttttttctgacttgactctgattcgttacgtgcctttcgttgcatgggatttcttcctagccatcactggaaaatcattttaaatattagtttcaacaaaaactaaccaattacaacttaacaactagtaggaagtaatatttatgtgtttagaagtaagtcagtacattttagaagtaacttaactagtaggaagaaaaaaatgcaaacttaatttcattgttctaaaaatattactcatgccataggaaaaagtaagttttaactagactagatgcaattcaataaatcaaatgtgttgcttaaggaacatttgatttattgaattacatgctgcatatacatgcatgcacatacatgctccccccctatctgcagcctctgttctctgaatgtacgtcgatctctgcagatcgatgttgatctattcaatccatgttggttgttacgacttgaaacctatgtagctacccatatttacactgtgtatgaaagcatggaaacctagagctatcaaagggcacacaaaacccctggtaaaaaaatggcagcacaagtacacaaaaaacctctgttctctgaatgtacacaaataacataactgaatattagcatctacaattagcaacatggtaactgaagaaaaatcacactgggtttacattgtaaatgaagcatggaaccctaaaaaagctatcaaaggggcacaaagaaatcctagtataatggcaccaagttttcattatgctgaggctacaacatgaaatctgactcatggcctgtgcaagcaaatgtgcaaatgccaaaatagagaaaaaaaatagaaataccttcaaattgagcaagagatccaccaccacttgtgctctctgagaggatgcagagagggcgcagcaaaagagagcccgagatccaccaccagcactagcccctggatgaggaagagagagggggaaatgaggggatagagctagagaaaaaacaaatgccccaatcgcacactgatttgcgcagttaaaatgcccaaatctctccacctctcccggcacaaaaaacgcacacaaatcgctccacctctccacctctaccggcaaaaaacacacacaataatcgctcccccctccacctctgctggcataaaaatcacacacaaaaatggatcgctcctctctctccggcgcaaaaaaccacaaccacctctgcacgccgcagcttaccgccggatttggtggagaggaaaccgcagcctctgcttccctccccccctcccccacaactaccggcacgatgagacgaaaacgtcgcctctaccgcggattccgccgcctccgccgttgattccaccgctggcgcgacaggacgaaacagccgtaaccttcccccctcccaaaccgccgccgcggcgacgtctccggcagggatttggccggagattctcgccgcctccgctctctccctctctccgccgctctctctctcgagcgccacaggaatttttgaacagtgccaactctctctctctcggtcggaaaaagtgcgactcgcggtcgggacaagccgacccgcggtcaggacgcgcacgcgtgccggatgaaggccacgtcgcccgcgcgccgatcgacggctgccacgcgcgtcgcgcgatagcgctaaacggagaggcctctccgtttagattatacgatttaatttatgaaaaggtataaaagtaggatattgaataataaatatatggaattaaataaaagatttaatatcttagatcccgtatttatgagatagatcccatatctagacgagcgaaaaagggaaaatacgaggcagaaagagtttgagaacgaacccaagctgagcagcagcagcttcagacgcatgtgactgttagtatgtgacgatgacgtcacggccccttgctttttccagcttccaaggcccaaggggtcgcttgccgtgccgtaatatccatccatcggattccaacggccacgattacacgtgcgccaccgcctccccccctctcttcgtcacctcaccccccaacccaaaccaacaaaaataaaaacgacgaaaagaaaaaaaaaaaaagatcgcgcacacgacccccccgacccgacgccgccaccacccacccccgtcgcagcagctcacccccacctccaccgccatagccatagccaagccgcgggagctccaatccgagtcgaccccggcggattccggcagggctaggcgcgaatccctcgccgcggcggccgcctgcatcgatccggggcctcgcgggaggggggggaccggatttagggtttaatttatgcatggcctcgtcccctcctggcgccggcgccggcggggaggagcggcccgcggcgagccccgcggccccggccgtggcggaggcggtggaggaggggccggtgacgtcgcggtgggcgccggagatcagggtgtaccggcgcaagtacccacgcaaaaaccctaaaccccctccgaaccctagccctagctccagccccctcgcgcaaaccctagcctcgattcggaggtcgattcgccgccccgaggatgggcctgcggcgcctcggcctgatccgcccgccgcgcccgcttcctccccccatccccctccgccgagcgccccggttgcccccgcgcagcagggggagcccgccgcgcccgcttccgacgacgtctccgcggggcctaatcgggacggcggggccgttcccaacggccatggagacgtccgggcggccgccgaggagaaggcgcggaagcggagggcgcggagcgagctgcggcggcagcttgcgtcggagctcgaccaggtgcgtgggctttccaagcggctgaaggcggccgctgaggccatcgcggctgagtctgcagcggcccttgctttgcctgtggtggtgccgccgcctcagcttcctgttgggtatgcgcactcgcagttcgcactcgctgatcctgtgacgcccatacctggtcaagttgctggtgctattgttccggtccgctcagtgatgcagcgcgggccactaaccgtgtcagtgactcacacagagtccttcgagaaggagaagcggacaccaaaggcgaatcagttgtatcaaaattcagagttcttgcttgccaaggataagtttccgccttcagattcacatggtcgtaagaaacccaagcaccacaagaagaagcatcgttccttagcatctcatggtgctggttatgatgctgagcagaggctatactctcatgcttttaagaaatctatgtcgctgctttctaggctaatgaagcacaaatttggttgggtgtttaacaagcctgtagatgctgttgcgcttggtttgcatgattattttgctattatcaagcacccaatggatcttggcacgataaagacccgactcacgcatggccagtacaggaacccgagggagtttgctgatgatgtacggctgacgttccataatgccatgacctataatcccaaggggcaggatgtgcatttcatggctgagcagttgttgggaatctttgaggcgcagtggcccgaaattgaggctgaggttcagtaccttgcctcatgtccgccattgccaaataagtttccacctccaccaattgacgtgcgcttccttgatcggtcagattctgtaaaacaccatatggtgttggactccaagtcaaggccattaagtcatactcccacttatagtgccaggactccatcgatgaagaaaccaaaggccaaggatccggataagagagatatgacaatagatgagaagcggaagcttagtaacaaccttcagaatttgccaccggagaagcttgatgttgttgtgcagatcattaagaacaagaatctgtctgttagacagcatgatgatgagattgaggttgaaatagatagcatggatactgagacactttgggaacttgatagatttgtggccaactacaagaagaacctgagcaagcaaaagaggaaggctgagcgagccatgcttgcaaggcaggatgcagagttgcatgcacaacatgttgccccacaacaaccagtatgggcattcaatcattcctattcctattctataagtagcactatatagttaattgaattttatgattggtgctgaaagttacagtttcttggattgcagagtcaagagcctaatattggtgtaaaatctccaaagcaaagtaagttagatctgctctattttgtacttcatctaattgtccaagtcaattgccaggaactatggattatggaagcaatataatttacttattttcttatatgagcagatttgattgtggatgagaaattagctacttctgtgccagaacaagctgataataatggacaaaatgcaagtagatcgagcagctctagcagctccagcagtgatacaggatcctcttctagtggtaatatttctttctgcccttggttttgctcatcatattttggtatttacagtatatatatctaccagctgtagacatttgagttagtgtgtaatcaattaatattctttttggcagactcagacagtgatagctcctcttcagatggatcagatgccgccaattcatcttgaaatgtaggtaggttttattaagtagtttttgtgttcttattgctgtatttgtttcactataatctaacctagtgagttaatttaaggtttttctgttattattgagttcctacttttaatttatgtctcaatgatcctattgatggcagtctgtttctccaatattgctggtggttattcaaataaatccattcttgtgcaaacatagacatttttatttctgtgaaatcaatatagttaagtactatttatactatactccgtgtgaaatcgtatgtattcacatctctgtatgttttaggagaaatttagaatgttcctatctgacatgctaatgtgaatatattgattcgtaagcatgcgtaccaggagtataccatggtaaagctcaactcataaaatatgttaatctgaactagttaattacccactcttaattgattatatagtcaggctgactgattttaagacttaccaccctctagcgtagaactgggactctgggagggcatctacttggcatgtacatctagctgtaagccaaactggatgattttatgaaagcacagttcaactgaatggatgtaaaaaatcttacgagatgcatacaatggggaagtctttgtgtttcctttctctgtaaactcagatggtcgaggattcatctgataatttgtaactcataagatgggagtgaaattgtggttaacaagctgacatgttatgtatagcccaagatttggaatttgggaaggtggagaaatagaatttgtagtttcttaggaagggattagttccagtttgttatgcttccatatgttaacacttagttttcctaatcctaaaagataatttctatttattgggttcctcaaaagtttctatccattaattgttcagatggctgtataggaaggcatccttatattaatgagcaatggtaacagaaagatgcactgagaaaagaagtttcatattttcctcttgttcttctagattgctttagagccttgtgtctacagcaagagtacgcctcccagtagacaaatcaagggtcagagtcagtgccctatcctggtttatcgggtccttatcctgtttcacattacaagaggtacttgtgggtttctctcctaggttcagggggtcaattatatttcaggcaacgctacaaacttgatggttttagtgtgtcaagctaagcagaaaaacaagagattatcatgtttgtggactagatgcagggccccttgtgtttactgacgtccaaacagggttagggtattctatctgtgttatggtttctggagccatagcattaaaagccagactggtcatcaggtcagactctcggtttgttgttctgacagtctgaccggaggaacactggttaagctgtggttaaaagaaacttcaaatatactccctgcttcccaaaatataaggtgtgttagccttttacagagtctccaggagtatactttgaatcttttttaccattaatttattttgtaatacattatcgacaactaagaaattaatatcatatgaaagtacattctaatacgaatctaatgatatcacatgcgtggcaataaaaatatactttaattattagtaaaaaaacacatttgactgttctaacaataagggtgctttgtattttgggatggaaagagtatttaatattccttcatggacacaacaaagataccacctgtccagtctgtcagttcatattatgcctagaggcaggtggatatgagtctgctcacatttctctttaatatcacagcgctatattatggtaagcattcccccatttggaatgcactttgcatcgcttaacaatgtttgtgacatctgtcatcacatccaactagtattcactaaggccctaggtgtgtctgttggaggactggcgcctggtaatcagccgtatagattggataaatcggctaggtgagtaaggcttgaagttgaaggtgtcagcactgcaagctacctcggcatgaggaggctaggcgtctgcctttcagaatgctgcctccaaggcttcaactatcattagttagtacaagagagtatgtttgtccagtttggcctgagtcagaaggcgttggggtcattggagtcgatgacggttaactcatagctagaaaggttcaaaatatctccactgatccaaatcttgtctagctctagctcgattgttgctcttcgtgagtattttcaataataacttcatctcaaattggtatttgataatacgaccaattcacgcaagcacatccccatgagtgttttagtgcatacttctaattcacttcatgtgcaattatgtgcatgagcctgtgctctctgcgcaaacagttcccgacaaccctttctaccatacatgaaaatcttgttttgtttgacactaaacattctcatgaggatgaattgcttcattgtactcctacagtgtagtagctgaatgccatagccatcttgaacacttgtgcgacacattctcaaaaaccttgtggatggtggctacattgttaaacctaggataggatggggagggtcacagttacagaaatgcagtttgtctcagcaaagccacgatattttggtgtcctagatcaaatgccatgattcaaattggagatgccatttgttccccaaagactcattcattccttttcaaattctttcttatggatcattggatcctacccattgcaaaacacaacaaaacatgacacttatcatacatggctacatgagaaactattttaacctcatttatgaatacatattatgtaatgattgaaatgtttgtcttagccattcaaatcttcttttgtcacaaagcttttaattcttagttcctgctaactggaaacacattttctttgcactgggcatagtacgaaaagttagtctgatggccagttccggtttaactgcagttcacggaatttgaattatagtgtatgttccatttcaaatgcaagttgatggtggtggggtggtagtggtgacgttttcagtttgaagacccatgcttgaaccccttcatccttttttcgcttgatagttgatacaagttgtgtgcctggatgttctgttaggccttgctttggccccattctctgctatagccatgcttttcaggtccaccagcattttctggaatgttgcctggttcagagtgaagctgcctggtctatccagttcaaagtgttccatatgcatgagtggtcttagcagatcagactgagcacaacaccaattccagttaaaactgcttgtctggtccagcttttttcaactatggcactgggattgagcaatacctgtttcttccttcttttttaagatttaagatagtaactcggggatttattctctctccatcatgtggagtgctatgtataagccattttcacttggttgaatttgcctaatagaagaatttttgccagttggaagaatggaggtatggcagtaaaaacaattaaacagatgtgtgtaacatccctactacatccagacatttataatatggttacataacaattggagaaaggtctatctcctttaagtaaagaactactaagaaatgatgcctgcactgaaattcatatttacagagcaataatttatctttagaatatcccttaagtgcttcagtttgttgtggtaatcaattatttactcactgctataatgtgtttaacttcttgtctgtttccttctggagttcctttcttcatcctgtagtcattctacttggttttgccttgctgtgcttcttgataaaataataagtacgttgaggaccttcctgtgctttagtttgcttgtgcttttattcttactagtaaattgtggtgttatgctaggatggccatctgaagaccttttcagagttaaaccttggtgcttgcaacctatttatgcatcagtattcttttatgaagaaatcctgcaaatgatatagacccaagtctttggttgattggcagtagtcttccttcatacagttacacttggtctcaatgagaaaaagaatcaaaaacaaatttaaaaccctgtagtctcatagttgtctctcttgcatagggacttagtataatcgagtttctttcctgatatgatcacatgagctagcagcccgattaattggtgccaaacacttaggttacttttctcagtcaccattttcagagctttaggagttgacagtgtcatttcgaatatctgattcatcattttttgtgatatgtactttcatatgcttataaatgtgcattttggaagtatggaactgtgagagtcagatgattgttgcttttagcatagactctgtatagtactttgggtgtgtgaaagtaataatttagccttttataggcggaattggagtcgcttgtcagagcgtgacaatcttggctgcatagatttattgtacatgcgagggtgtgcagttgatcactgcatctgttgatcctgctttttacctgctatagcaaccctagtggtttcattaaaacatatttggacctattagctctgttccatgactgtctaggtactttagttctataagtggctctgctattctctaattggttcactcataacgttcaccttctcctgaattgcagattcagaacttcatccaatgaagaataactgtctaattgtatttggcatgacaatgcctcagcaagactcaagacatgcctatcttcgtctatctaggaaatctccgagttgcagctaggatgtcatccgaaggcaggattctgcaaaggcctgctgagcctgatacaagttccattctgctgcttctgtgtacttatgattgtaggttaactttgtacactagtccattttcatttgtttggcagcagagtgcagctgtattatatgcaccttggcattatggatacccccagctgaaggcaaggtattcactaggctcagatccaataagacaggcatgcatgctgacgctgatcttatctgggtaggagttctgtagcctgtagattagccacagctggagcattatttacgttttgccgcgttgattacttgattgctgcagtgagtaggaaggtgatttgtctaacagtttggtgactccactcctctggaatacaggtaatgttctgactatttaaccgttccgcatcaaatgtggcctgttgacggtgttgtaaaatttagccagatgaagtctgttgataaacgttgctttggtgtttgtcttgtgttgcctgtgatccagtccatgtcctttgtgatgaatgcttattccgaaactgatcgtactgtattgtcagatcgttttgtgcacgagtttttgcaacctttccggtggggttgccccatttgcttatgatagtttgttttgttcgttgtctgtacccttggactctatccatttaagttgggcattcgttttggttggaagcttgaaggaagctgcttaatattttctttttcttcactacgagatgaactgaacatctggtggttggtttcttgttctctttgtactttgtagtaggactaaagtgccagtctaacttgatagtagtaaagcagcagcattatagatccgcacaactagatgggatgttgattgttatctgtttgtttgggcctgttcgaagacagattttcttcattttccgtgggaatgtggctgattcatgtatgaataaacgtcgtgtactcttaaaagaaaagagaaaacgaatggttgtagtccaatgctcagtttggtccacccaagtgtcgccttcctttgcacaaatgatagccgagcaggttgccagatacgagccaaccaactttctgagatgctagaacgtcagatgcgttggattatgcctgtggaaaaataataataattaaagaaccaccgttttgtcagtctcacggactgtaaggtgatgttgaatacaaatgttagagcaagcttaaccaggttatgggcaggcatatcatatgttccatgtgaaagcaacataataattttttttaacatatgatccatgtcaaaaattatgtcccatttctggtggtggtggtagcggttgttaaggtcgtaaggatgagttcataccatatatttattcatatataagccatcagtcatcactaatcgttgcaagtctgtaatccctgcgaacgtgaagatttaagtgcaattcgttttatggctaatcactctaggtagaatttaaaaaccttgattccgtattttacattttgtcatgaagtatttgcacaataattgttttttttaaaaaaaaaaggtgcatgcactactgttgctacagtcgatgtatctcattatttgccacgtttgttccacccctttcaatgtataaattaatccatctgtttcatgcctcaatcatttggtcacaccacagctatcaggttaggttttggagtggtttccttcttgtgaaaaagctgcacatgccagtaccattagaaaaaactggaggtgtattttgcaactacttgacaacaatgtttagagaggaaaccacccccttacgcaatttttttatggttagaccaactttgctctggaaggtttggtgctgtcttctgacttctcaccgaaccacaagggccatcaacaaaatcaacaagaagatattaggaggaaacttgggaggattagtttaatttcttcttctaatgtgggtgattcagggagcccatgttatggcaccgtggtggataagaaagtagtatattagtatcatttatctaaaaatttcataccaaccagatttgcatcattttgacctatctgatgtggttttaatctgccagccaatccttttcttccttttaagaaaagaaattttggttcactggttggtaacacagcacaatcgtttctttttcagttggtgttgtatcgcatttaaattgaccaccatacgacctttgcttatgtagtcttgtgttcatcatccatctacctggagtatgttctaagctctaacagtttatgacagtgacacattgttaaattgctatgcacaatgacaacgcattttaggttttctttggagcaaatgggatatattttattgatccatactgaattgaattatttcatgagaaatcccccgcattctagatacaatcttatcactaaaccgatcaaactaccgtacttaagtattgatacacaacggtaagaaaaaagaagtattgaagggaaaaaaaactgtaaaatgatgaggagcaatctgcgcagtgattaagggaaaatgacggccaaatcgaatgcaacccaaccatgactttgtctattaaatttcctgcttggatgaacatattcggcaacacgtgccattttgggcagaactggtgtcaaaagttgttctgttggtatgcactgaagttttttgcgtgcggatttgcgatgctaaaagttgtcactaccatggttttgctgtcaatttatacttcgttagctaaagaggtgcattatgatagatctcattaggtgcaattgctgttggaaatttttagtgtggaccaaccgattattactcaattgagttaaagccagaggtattactctgattaaaaaccagaacaagtgcttgcaacttataatactctagctggataaaaccaagtttctcagaacgaacttctaacaacttacaaataacacgatgattataaattaactcctatcaatttggacacaagcatgcccccactgcattttggcaagaaaaatgcggtcacacttatttgattattctacctatttataatgtcggatataggaattctttcgagcctagatgaaactcgttacaatataccaccataccattttatacaatgatgtaatattttcatctcttatgccagtgaattaggacaatcggccagtattatttaaacttttaagatcgaaaatgtatgacataaataatatactagaaaaaaaaatatgccggtccaatatttcggagataatcataaggatatgatgtacgtgtgtatgtttatagtggtgaatgtgcacgtgttataagcgcatacgtttatactgtgtttctataataaaagtagaaatacgaaaacatgagttcacccaatccagagcttccaacctcatatacaggccgagtttagttccaaaattattatttaaacttctaacttttccatcacatgaaaactttcctatacacataaagcttttccgtcacatcgttctaatttcagccaaacttctaattttagtgtgaactagacccaccattagtcacacactctccactccccaatttgatctaacactgccaaattacccagaccaaaaactttgactccaaacacgctctcttcatctagctcgagtccaacaaaccctgcccgaaatacgcccccaaagtccaaccgtgtagcccactttttcctccatttctcacacatacgtgccgtcgaatcccccacctcctccacaccggacagcctgcccccagcttccttccttccttctcaccttcctcctctcttcgcctcctcccctcttcttccccactcctccccctcccaatcccaaatcgcaattactccccaagccgcgagagagcccgagagtaaactaatcgccatccgccaccgcgcagccgcggcagctagctcgcgagaagaaaacgccacgcgacccgagagcgagagagagagagagctaagccgccgtgcgccacgccaccaccaccaacccatcccaatctctctctctctctctcctcgtgctcctagctacaagaagaaccccctcacccccaccccggacacctacctagccgctacccctctctcttcctcttcttcttcttcttccctcttcttgtggtggtgggtttgacccaagaacggaggagggatagggcgggcggcgatgggggcagttcgggggattttggtcgtggcggtggttcttgcggtggcggcgattcttgctggggcggcggaggggaaggtgaacgggaaggcgaaggggaagtacagggcgctgttcaacttcggggactcgctggccgacgccggcaacctcctcgccaacggcgtcgacttccgcctcgctaccgcccagctcccctacggccagaccttccccggccaccccaccggccgctgctccgacggccgcctcgtcgtcgaccacctcggtgcgccccttggtttctccgctagattggatttcgatgtctgcctgctttgtgttgctgatggtttggttttttggtttggatcgcagccgacgagttcggcctgccgctgctgccgccgtccaagctcaagaactccagcttcgctcacggcgccaacttcgccatcaccggcgccaccgcgctcgacaccccctacttcgaggccaaggggctcggcgccgtcgtctggaactccggcgccctcctcacccaaatccagtggttccgcgatctcaagcccttcttctgcaactccaccaagggtataatcataaattgcatatgcccaaatccccaccttaccttgtagctacctcgcctcactgaatttggggatttgtttttgtttttatctccagagagaactggattggggaattgtatctgattgttttgatgtttttgcagtggaatgcgatgaattctatgcgaattcgctcttcgtcgtcggcgagtttggtggcaacgactacaatgcgccgctgtttgcggggaagggccttgaggaggcctacaagttcatgccggatgtcatccaggctatctccgatggcatcgaggtagaaattcaatagcttcgttgtgtcgcctatttgttagtggtcatgtggagaatgtgatttcaattatacaactgttcgtgtttggtgcagcaattgattgctgagggcgcaagggagctgattgtacccggtgtgatgcccactggatgcttccctgtctacttgaacatgctcgatgagccggccgatgggtatggcccccagagcggctgcgtccgtcggtacaacacattctcatgggtgcacaatgcacatctcaagcgcatgcttgagaagctccggcccaagcaccccaatgtgaggatcatatatggcgattactacacgcctgttatccagttcatgcttcagcccgagaagtttggtaagttcttgagctctttgatagttagctagctcaggaagcatcagttcgttcttatcctttatttcacatcggtactaaattggcttttctagcaaaataactgttttttagctcttgctgctctaatttacttgaacagatcaagtcaactgatacctagagtcaacttttcctcctgtcacccttgaaagacacaatatattatttttagatagttcagatctgggtagaggtgccttatctctctagtagcacactgcaatatttcaaattacagtaatgatggatcacaatttgtgatttgaaaccaattagagtagctccatctatgttcagagtaaattggaagcaaagttactaatcccatcttcattagaatcttttacactagtctgtaaagtagtatggctatcagttctattagtactctaccactctttgttcaaaccttgtcctgttgttaattgtcttcttgagagagggggccatcctgaactataatgagattccacccatgataggtaatgtggggctaacaattaggattgtctgatggtctgattgttatacaagctacatacacaggctgcccaacttgtttctccaggcaaccatgtaaaaaagctttgaaccttagccatactgtcacctactttaaaattatggttgtggcagctctgctcttgtttgatatgatctagttcagtttcaaaactgccacattttgattgtctccatacatattttgccaccgattcttttaaaacctcgcacatgggttcgagtgggtgtatattatcctcgtgagtttaattcgaatagcagtggcttgaaaacaccacaaataaataaaatgacacattggcacgttttccctacctaacctttttacctttttccaaccatcgtgtgtatcacaaatttcaacatgtccttgttgcggggagtacagacatgtaggaattgctctgttagctgagccatcctttttggtgatccacttctgttatctaatgcttgcttaccttgctggcaatgaccttttttatgctttgtagttagtgctttttaattagagggagcatcagcaggtagagttatgaaatcttctgcatagtttaatggccaagttgggcatcacggttcaatggccttgtcatctctagatcacatccgctagcatttctctttcattgtgtgtggtagcaacaaacacatctttggcccatttaattctgctaatagagactgtttctgtctcaactggtgaagaaaaaggattcagatgcattattgttgattaaaaattgaaaacatctaacgttcttgccttttcaattcaggattttacaagcagctacctagggcatgctgcggggctcctgggtccgttgcgaaggccgcttacaacttcaatgtcacagccaaatgtggtgaggctggtgcaaccgcgtgtgatgatccatcaacccattggagctgggatggcattcacctgacagaggcggcttacggtcacattgccagaggttgggtatatggtcctttcgctgaccaaccgatcttccaatcttcatgagaaagtcacttcttccgttgtaattgtagaggtgtatcacgatagtgcactgaaatggagcagggaaagtagttcttccatatggttccaaggttgcatacatgtatattttcattctattacattcattgcagtcaggtacaaaggtggaatagggctgtcaaaagcttgattttgtttatttgtcaggcgacataactatgaaaatgtaacagacacatgattgtgtaaattgcctccggaaatatgatacaaattgtctttttgagtatctccggtttccctggttcaaatctgccctgttcttagcagcagcttttgtctgaacatgttgctgcgttcttgtacagaaaatgagctctgcctgaaagtttatttttggtgcattttagctgcaaacaattagcagaaggtgagggttactagtgctaattgaactgaacatggcgaggtaacgggagaagaatcctgaatatacaattggcagtgatggatgcagaattcagaacagtgcatgcaggtgggagttgaaactaatgaactgatctgaagaatctatttttattattgcgttgtacgttgcttgccatgtgattcgcacttatttttagcagcccacgaactgacgaaccctggtttgttttctcctttttgttgtcagtgtatccctataagttttgaagtatgagctgtcaatggagatatcaaaagatatcgaaaagcaaagaaatttcctttggtactagtaggagtgattactgaagcaagtacatccaagttaactgaagaaaattccagattgcattagtacttcttaagggaaaaaagattcgtttaaacattgagcattaggacaaacgagagacaaaggacaaacttcagattccagaagagttacttcacaagttcacatctcgtgtttcagaatcgcacatggtcgtactagtgcactagttacttacgatctgtccaaaagaacgcaattgttatactacatgtactagtacagtatattgtcctactgccctactggtcctcacttgtgctttctattgtactcatgggtcatggcaattgaagaatatgatattattggaataattgtgccaaaaaaaactcatgtaaacattttcaagccaactcacacatttaaaagtaaaaatgcaacagcatactggcagattttttttagtaaatttcataaaaccttacatattatgatccaagttgcataaaatttcataaaacccttaagatttatttctccattttagcacatggtacataaccccaggtactgttaaccaattttatatacccctatataaactctttgaaaagttttacatatgtgcatgtaacatttatattatggataaaaaaaattcataaatttaagatgtgatcgtagaacttaaaagtatggtggatcaatgccaaaatgaacaatagtatgattttgtaaaattttacaaccataatacacgaggttaagtgtcacgtgctaaaattgctatgattttattcaacttagaccacaatatctagaattaattaagtgaaatttaccttttttaaggggaggggggtttgtgagaaataaatccatcttactatgataaaactcataacatttaacttaaaattcaaaaactaggaaaccataggatctgatttctcttattagtactatacagttaagagtaaatttcactttggggcatgtattttgaccatacttgcaacatggactagggatagaactatgttttcatttaacaccatatatatttgcaagcttttgcattttgcaccgggtcaatggtttagactgctatgttgcttctccaaatgcgcataaattacttcacttatacctataactaacgcagcaatcgcaacggagcaatagctaattttgcacaaaatcaatcaagcttaacccaaaattaacaatctccctaagaaaccataaaataaagtacccgtgactccctcctcttttcaatcctagcatcatgcgagatgttctccattgatgaaactgacaaagtcaaactgccagatgaagctgatgagggtttcgatgacctgtaccgccgcgctggtgactgatgttgaccacagagttgcttgacattattcttactataaactttttaattaattagagctgtcgatttactagatcgatcccaaggaagatcgaagatggcaatgcagaacggaggtgaagacgtggagtccaccacctgctgcttgcatgcacgggtggagaaaccatttatactctcggttggtaacccctctttagtcccgattccaatctttttaatcccggtttttcaaccgggactagcaatccgggactactttagtcccggttttccaaccgagactagcaatgcggaactaaagatgtccatatttagtcccgattgaaataaccgggactaaagatacctaagagagggtagcggcagtcccattaggtctccttttctttttttttcattgtttttttttagccagagtttaatccctgtattttctcccaaatcaagtgggatgcatattccaaatcaaacccaacatcccaaaacattcacatcacaaatcttaagttacttgtacacacaaatcaaatacatcacaaatcttaaaaaaattatacacaaaccaaatacatcacatattatacatctcagatccatacaacaaatcacaaaattatacatctcagtgaatcacaaattgtaaaatctcagtgaatcacaaattgtaaaaaaaaagagaaaaaataatggatgccggtagcgccgcctgccgccgctcgctactcggcccgtgcccagcgcctgctgcttgcggccctaccgggtgcggccccgctgggcaccggaagggaggagggggaggaggcggtcattgctgggcatcggatgcgaagggaggagggggaggagagggtagggatgggaggaggaagaagagagggagatggatctgaggagaggccggttgttgaggagattgaggccggttgttggtgagaggatagggaatagggattatatactacacgtgattttaatctcggttagtaataccgggagtaaagatctaggagattttagtagtggtgatctttagtcccggtttgtgacaccaaccgggactaaagatccccgcccctctgacaagggaccgacaggggttggtaacgtagaatggatgtggggttttaaaccgggactaaagatcagttttgggacgaccgagtaaagatcagttttctagtagtgatggcatgccatggacagagccacagtggcagttcaaacccttcactccggtccaaagtgaaaaagcttgccaacatatatggtgttaagtgaaaacatcaacttatccctagtccaggttgtaaacatggtcaaaatacctagcccaaactgaaatttactctacagttaaagctcttggttttgaagggtggtgagactgttgtgttacgttgtataaagaggcagataacttcagtcgcgcacagaagaactccaattccaactcaatcgaacctccaagaggagatttggaagaggatggaattaaaattaatcatcgtcggatgatccatgtaagtcagtctccttgttcttctacctacttaatcatctctgcttattgatcatgagtttttttttgacatacgtatgtaacaatctatcgatctaatcagttagatatgactcaatccagttctggtattgggagcatatatacacatgagacagattatggcttgcaagctagctgcaatatcgaatccattttatacagctagatgagaaatgaggatccaaaatgttctccccaaaacaaggatccattttcgcccaaatttcacatgcgcgcgcaaaacaaatgataattgcagtgctacagaaactataattaacttgattgcatatacattggtcgcaaactcccaaaatacgagcaccacatgtaactacgttgcacaacatgatcgctgcatgaataatgaatagctaagttgcagaagataatgtctgagcattcggaaacatagtccttttttttatatatataaaaagacattttgaatcctgcaaattccacagaaattcagattcaggtatggatcgcggtcattaacaaacggagtataattagctgttgcagcatcagcatcagctctatatacgtacctgcgaaggggtaatagtttcctgaatttcaattcaaagaaggattcaaagtagttcatgtgacagggttaattaccttccaatctagttaagtccccatgggtggatacagatgaacaatcatatgcatgtttttgccatgcatatgcgatctgccatctatcccctcatgcatgttcatatcctcacaagtaatctcgtcacacagcagttgattagcttcaattgattaacaaatgtatgcatcatctggaactgaatttccatcatatattaattttaggcttttaggaattaggacacggcagttcattagcaccaatcgattaacaaaaatgtatgcaatacctggaactgaatttccacataactagcaggttttttgacaaattgacccttttggaaaacttatttcgaaactaacccctgccaaaaacttcatccaaaaataggccgtcgcctcagcgccaaacacattggcgctgacgttggccgtgtcagcgccaacgggactggcgctgacattgtgccaccgtggcggccgggccgatccccagctgacgtggcagctacctcagcgccaaccggactggcgctgaggtgggacttggccgcaacccccaaggcccagacaagcaaggcttctggatggcttgcgggcttggacctcagcgccagccataatggcgctgaccgtgcgacactcagcgccagcccacctggcgctgaggttggacttggccgtttcggccgtggcccagcccagcaagccttctggatggctgggctgggacctctgcactggcgttgagtttggacatgtcagcgccatttagcatggcgctgacgtcccagccctgctaaactttagtaaaactttgcacacaacacaggcaaacatcaaatcacagaaatttacaggcagcaatatatccagagaaccatacaaaacatacatccatccatcaatcccaacatcattccatacatccatagaatccatcaatacatccatatatgaagtccatatatataagaaataaaaacatcccatcgatcctcgtctatacatccagtcgagtccatacatccagtccatacatccatcgaaccatgcatcaagtccatccatctatccatccatccattgaaccatgcactcacctcctcctacctctagtgcgaggacgaggcacgtcgggggtgtacctccagtcctgcgaaggagcccgccggcgtcgtggtcgagacgggccgggctgcgagatatccggctgtgacgactctggtgcgtcctctagctgcgagggaccgagctcatccgcctcctcttctctgtcctcatccccttcttcctcctcatctccttcctccgcctctttgtcttgctcgccctcctcgtcacccacctccccttcttcatccccctcttggtgggcatgagcatgttcgaccacatcagtcgacctgcagccgagccttgctgccaacttccgacatcgctgccgtagtctctgcataaaaaataatccatgttaagttatcgcttttggaagaaaacaccgtagtttcatctctttccaacgattacctgtagggcgttgcggagggtgccgccctctccttcagagccaggagccgtgcctagcgccactcccgcgtcgttgacggtccgcaagagctctcgagcctgtaggattgaaatgaagtaagtcacaacatatatggcattgaaatgaaataatatacaacattaatgctagaaactaaccactctgtcgcgaacaggtcccgtctcgaccgtggtacctagacgggtacgagtatcgtacttgttctgctcctcaacatcctcggggtcatccgctatgtcggctagtgtccaagccggacgtaggacaagacggtaggtcctgtggagccacgccaagtacaagtcgaactccgtcccgttgtgctgaccctggtctggtactccattctcctcgaacttctcccattgcgtgatatgatcctgatggtagtaagcccaatcagtcaccttcttgttcttccgacggtccaccctgcacgtatgcaaaatgtccaactcaaatatgtagtaaatgttgaagtgactgattgggcaagcaaaataaattgttaagtgaaattactaacttgtgtaggtcgatactcgtggagaaacggtgcgggattgtttgaagcctcccgaattgccgcatcacgcggtggcacatctggaactccactgcatagaagcagatcagtgggcaccgtagggtcttcaacgcatcctctatatggcacatgggattcagttctagcttgagcacttcctgtgcctgatatggcatccacaccacctgcagcaacaaaaataaaacacattgaagcacatttagtactatatagtaagaaaccatcttcatgtgtgatagaaccccgaatagcttacatgttctggctgtaggtagtccatctcgtttgtgtagtggtagtacgccaaattcctgcggcctactactggagatgggaccgattcccacaggtgagctacagtgggacgtcggtctgcatcctggtgtggccaagcctgatgggtcctccacatgggccgaccaactggaagcctcatccacatccaaacctgcgtcacatacgttagcttccaacatgttagcaagaaattgaaatgttatgaaacataacatgcgtgaacttacctgtagcaaccaaacacagcctgctaggttcgcgtccccgccttgccttcggcaagcatcacagagttgccggtacaaccaggctagggcagccgacccccagctgaaggtacccgcctcgtcccagtccgcaagcaacagcagccacatccaagaagccatgtctccaccagagtcagggaacagaatactgccgaagatgtacagcacgtacgccctgcagtatcgctgtactgtagcctcgtctgcctcagcgggacactgaccgaagttggctcgcaaccaactcaaaggaacccctgatgtcttcgtctgcctctgaccatcaggtgccactggaggctccagaccaaggtactcctcgaccctctccctccagttccccgacgctgtgtcacctgtaaccggaaattaaatggaatcattagtaattgcaaaaaaattaacaaatgaatacgaagactcgttagtaattccctgacgctgtgtcacctgtgaccgcctgaccccggataggaagacccaggatcatggcgacgtcctccagagtgaccgtcagctccccgcacggtaggtggaaggtgtgtgtctctggacgccaccggtccactagggccgtcagagcagcggcgttgtacagaggcaccggtcgctgcgccatggtcacgaacgccaagagctgcgcccgccgtaggtacgggacgtaccggtcgtcgaacagtatgtgcgccgtgtgacctctgactcgaagggtcttcaagcgctgcatcaatagacaaacataataacataaagttagcgacaatatatcatatacaagggttgtggaaaatacatcatgcaactaggaactttaattttgggattgagcaagaaaactgaaaagaagatctgtgtgtttacatgctctgctttgaggctcctgaactttgatttgagttatctctatgatggatgatctatctgtacaaactaaaatcaaagaagaaaaaataaattcgatcataaaaaaatggaatattgttgatgctaacctctccgctggcaatctgtggggcccggtgcttctcctcgtagaaatcctccaaccccggaaagtgctccatcctgcaaatgaaaatggaatcattagtaattgaaaaaatattaaatggaacaatcacaatgagaacggaaaggaggacaacagaaagtaaacattgaagcaacaatatgaacttagcaaatgaatgtcatccaatcccacctgtgtgctacgatcatcatcggagtcggaagcggactcatccaattcatcctctgtatcatactccaaccagcctgggttcaatccactgcgtatcatagcctcctcacactcctctcgggtatagaatttcagcctagccaactcccttaggcccatacttacattcttagcattcgcttcttcctcaggcaactccacatcatctcctacctcccgaccatcctcaacatctccttcctctcttaccggcacattctcctccacattaacttcctcccttaacggcacattgtcctctgcatgtacttcttcccttaacggcacattctcctctgcatgtacttcctcccttaccgggtcattctcttccctgacctccacatccgccatatcatttactccctcgcccccctccacgtcttcctcaatcaattcttccttcctactacacctctccgacagttcgtgacagctaatgggtgattctatgagttgactttcattaaggtctataagttctttcttccctatcctaccatctttcttccatgcaaacacctcaagagatttgaaatgtgaccccaatactatatctatatatgtttgccattcgatctctccattcaagtctaacataaatttatgtgacatgacaccgccgcccacatcgtatctcccttgcacaccaaccgactcatcattccaatccaattcatgcttgatgcgagacattaactcctcaaaggtaggcttcgcaaaaaacactaattgtctaactgtcattccctcaaattggcttccatgtgtactttcatctaccacacaaccaccataatgaagccggaccaatctatccatctacaatttttaacccatgcataaacattaattacttgaaaataatatgtaattaccattgcaataccaatacttcaaaagctaacaacatgtctaatttttccaataaataagtacattactcaaatactacacattattgataaaaaaaactctactcctacaaattacctacccttcactacacatcaacccctttcaaaccctctcaatcaccacaaatccatcccacatcctaggccatcaccacacatccatctcccatcaaaccctagtgcatcaccaaacatccatcccaaatatattttgtcaaatgtatcaataacaaccaaatggataaagatatgccacctccacacttcatccccacccatattatccatctaataatccatccttagccaactattatcaaaccacgtctacaaccaaaacaatgcaaaatatccaataaaactttggggaacttagggtttatagaggggtttaccttctcttccgatcccaaactcaatgccgcacaaatcaccttcgattagagaggtttttgggggagattgggcgaggagaacgcggtggcgaccgaaccctaggcgggcggctggggaaaaaacggaggaagaactggctggggcggcctcggccgggctctaagtagccaaggtcagcgccaacttacttggcgctgaggttgggcacctcagcgccgaagcggttggcgctgaggtagctgccacgtcagctaggggatcggcccggccgccacggtggcacaatgtcagcgccagtcccgttggcgctgacacggccaacctcagcgccaatgcgcttggcgctgagccgacggcctagttttggttgaagtttttggcagtggttagtttcgaattaagtttttgaaaagggtcaatttgtcaaaaaaacgggaaactaatctcttcttcaggtattcctaccaacaaattctgccactgccactgccacttggttatgaatgtacatccatccaaattatggttgtttaaaacgacatcatctttactatgcgcacatgtcaatctcttgggattattttgctatgtataagataaatttgtcgttgcaacctgtgatctgttcccagtaccatcatttttttttaacgactcgcacgagacggtgcgaagttctattgatagagtagaaaaaaattacaagattacaatctggagggtcgtaaccaggaaaaaggaaaaataaaccaccacccacaccgacgtcgccaacacacaagcccaggagaaggctaggaccggaccggccgccgctaagcgtgaccgaccgccactagaccaacaaagggacccagacgagatcctgcaaatccacgactgccgcaccgatgccccaccaccacacaagctctaccgacctgtgggacccctgcaccggtgtcccccgccggctagccttcgagcgccgaagatcgcgccacacccaccggcagctcctcctcacacctaggtcgcctcctccaccgccggccgcgcctctcgcgccaagccggcctcctccaccggacgcgtctctcgcgccaatccggcctccctccatcggccgcgcctcttgcgccaagccggcctccatctccgccgcccgcgcctctcgcgccgagccggcctccgccgccatcggctacgcctctctgcgccaagccggtctccgaccctccaccagacgatgccgcgccgaccaaatgtagccgtctcccactccctcggctgtctgaggccgccatgcctccggtgaccgcgatcacggccaccaccaccacagccgctgttgttgaacgcctagccacctcgccgtcgctatcctcaccgcgcacctccacttgctgccaccagcgacccacatccgccgacatcgccagcgcctccacagtcacagccgccgcaagtcagccgctgtcgccgctgccaccaacgccagccaccgcctccgcgaacagccgccactgccagcggccgcttcgctgtcaccgtccgccacgtcgccgccaagtcctccatcggcgtcgttagccgacaccgtcgccgccaactgccgcgaccaccaccgtcgctgccgttgccaactgctgttaccagccgtcgcaagtcaaccgccgtcgccgactaccaccgccggccaccctccaaatccggccaagaggcgcagatctgagggagaccgccgccgtcgccgctgagcaccgctccgtcgccgcgtagggaccaccgcagccgccttcgcgccctctgccaacgccatccccgccgcctgcaagcaccatcgatcgacgcctgcaagcaccatcggccggcgcgcacgcgcctgcctttgccgtcgccctccccgccactgttgctgccgccctccccgccctccccgctctccccgccgccaccccgccagatccggccggagcagcccggatctggcggccaccgccgccccgtcattggcgctcccctccccgagtgcccgccaaagagaggtcgccggcttcgtccttccctgcctccaccttctcccatgcgcccaactcgacgccgacgctgatccggccagctccacctttaggtccgcccgcgccggaaccgggggtggccgccgccgcgagccccgccgccgccgtcctcgcgagccgccggctttgccggccacttgctcaggcggcggcgaggcagagaggagggtggagaggggcggcggcggcggctaggtttcgacgcccgagtcgcccacgggagacgacgcgggggcgtgttcattggatgagtaatatgtaaccaatcagactgatagactaattatcaagtttatttcacacatctgcggattgtaacatatatatacacagccgtggatccgtgattaacactaaatacaggaaacattattcgcaaacactatatacttaaactcctaatcaactaaagtacgcagtacgtgacacagtcggggagcttgccactacagtgaagcaagctcgctcgctcactcgagcttgcccttgtcttcttccttggtgacggggacgagctcctcctcgccggcgacgatccccttcgtgtgcttcgctatcccgtacaccgtcgcgcccaccgcctccagcacgtcgcccaccaccgtcgtgtcgtcgccgtcgccgccgccgccgctgccgatggtggtggtcgccgatgagttcttgccggactctgccgctcggttctttgcttcacctgctccgtgccctgcctgagcgatcgtgtcgctcgtcttctgcgccatggctgcggctgcgtccttcactgtgtccttggtctgcgccgccatggcaccggccttgtgcgccatgcctcccgttgtgtcgctcgtcgtgtctttggtttgtccggccatgtcgccggccttgtccgccgtcccggagctcggctcctccgcgccgtcggcggcgcgggccgcggcctccttcccttgctccgccttctcccgcgcgtactccgccaccttgtgcgcggtgtcggcggtcacctccttggccttctgcgccaccgtcgcgccggtggagagcgtcacgtccttggccttcacggccgcctgctgggtgtactcggccgtcgtcctgccggcggccaccgcggcgtccctggccttctccgcggccgccttggcgtgctccgccgccgtctcgccggcgctgagcgtgacgtccttccccttcaccgccgcctgcttcgcgtactcgctggccgtcccgccggtgctcagcgcgacgtccttggtcttctccgccgccgtcccgccggtgctgagcgtgacatccttcgccttcgcggcggcctgtctggcgtagtcggtggccgtccccgcggccaccttcgccttctccgtcgcggcctgcgcggcgtgcgcgccggcgtctttggcctcggtgcccttggccgcggcgtagtccgcggcgcgcgtggccgcggtcgagccggcctgcttggcgccgtgcgtggcgccagcactcttctcccgggcagcagcgccggcggcgtccggctcgccatgctgctgccgcccctcgccgcggttcttggcggtcaccccctcctggccgccggtctccgccttgccgcctccgtgtccctcctccgccgcctcgtgcttcttcccgtgctgcggcggcggcggcggctgctccttcttgcgctccacgcacgacaccacggtggcgccgggcgcccgcgtcgcgccgccgtgctcccggttagccttggcgtaccgctcctcggcgtcgcggatggcgtccatcgagttctgctgcgcctgggcgcgatacctgccgatctcctccagccccgccgcctcctccgccgagtgcccttccccttccttctgcttcgccttcctcggctgcttctgctgctgctgcgacgccattgtgtcgagcaggtgagctacgtgaacgagacagtgagagagtgatcgggtcgctgtacatgatcgggacagcgttgcggcgggaggcttaaaatattggagcttaagcggttcgggtttgacacgtgtgcacgaggggatgacacgttggtcagcgaggatgtgggattcgccggcgagaggacacgtaggctggcgccgccatttgccgacgaaccgatgccgacgcgccgagcagagagagagctcgacggcccaactacttacttactcaggcggcccatgaagcccatttaccctgtccgatctcatctcttcccctcctcgtctcgtcgagaattccccacttctccgtctcgccatcgccgccgcatccaagccctaaaccctctcctctccttctctcacccatggccgtggccacaattggcgccgcagcagcctccccatgcctccggcacgtccacctgttagggcttctgatcgaggcgcatccaggtgtgtagagatctctgtcgccgctccgctcctcgctgagggaggtatccgtatccctcttatgcgtgcctagagcgtatggggactcttgcattctcgggcgggatcttgtttctagtgttgtgataatcgatgacgtgtgtatttttggacatcctgctgctttctgtttactctttagcaccgcagattttacttttcaagtcaatagaggtgattaaataaattaattctgcatactgccaaatatatttattttattgaagtgtgaagcgataaattactagtaggtccttgcaacggttgttttattctctcttgatgaaaggattaacttacatgacacaggcacgcggcagtcatttggttgcatttattctctttttctcatatgctcatgtattcttgtaatggttaatttttcttgttttgtggatcctgtgtgatagtcttacaatgaatttccgaaatcaggaagtaaagcgaacgaactgacctaggttatggttttctcctggtatgaaacataacatgaagttagttttgctgacttctttggcttggcatagacgtgatatttccagtttaggattgaccatgctgctgagctctatgcataagtctatttgggttctgcccttttgaagctgaaaggcactgtagtgtgtaatgatttttaagatcactcttatttctaagcagtaagaaaaaaaatcatgaagacaaatgaatgaattagtatctgaatggagtcacacatcaagtttgactggaatgtagtcacattatggttacaccctatactataatgttctagggacaactcctacgagttaccaaaataaaataagctgaggctctctagaaatagttaacctatttgtgggaatgccaggtgtcagtattctttgttgctgttattcatgaggctataccctatttaccatgatctgtaaatgctattttctcgactttatgctaatatgcatgtattgcaagcaaacaattatttattgcagagatcaactagccatgcacatatactagaaacatgcacgtttaattcaaaacagtgcatttgttatttatgcactctcatgactaaactattctattaataaaaacaactcatgtttcatatattggtcctgcaagtaattgactatcccatttgagtagtatgggaataccaaaaaaaaaaaagaaggttccaccgggatttgaacccaggttgccagattcaaagtctggagtgctaaccactacactatggaaccggatgttgtgtttggtctcttcctgttgacatttctgtcttatgttccataaactcagtaatgatacaaaattgtctttatcctttttttaattgtttccatcagttatggcttcaatgaaactgtgttcctttttgagcatgcatccaattagatacatgcagaacatgacatttgttaaaaagttccattcatttaactttttatggtataactttttttgttgttttgtataattgttaaatgcatgacagtgcatgctctccaatacataacagacctccgatttctgtatagtcatttaatggaatcttcacaattaaatcttgagtgaagtttgattgcgctgatgtacacatgtgaacagagtgattataagatacgccaaccacagtacatagtcaaatataatgcacaaaattaaaatttgcattcgtttttaagttgaaatagttgtgaacatggagctgccttatgaggtggacacatgcctacaaaatacttggatatatgagtatgtcccttatgtgatagctactcttaaagtggtttaatacttttatatacaatgaaagggttgaaccttacaacattaactacttgttcttattgatatcgtaaccttgcagtcgagaagtttctctgggcaaaatttaagatgcaaggagatataatgatactcttgtccgatatcacccttcaagtcaaggtcaagctaccttatactgacatgatggtaacaacttcagttacattttgtggtaaggttactaattctcagttacattttacctatcaactcatttgattgttttgttgtattaatacaagatatgggggggttcatgaaagctcatatgttattcatatcaacttatagagtgatatcatttttatgtcaaagacttctaaaaattaatatcgctagtgaccacaggctgtctgactgtcagttttgcaagggggaatcagaaaaactgaccttaactgcatagagggcccatgatcgttcttgtgctgggattagatgggccagcactacctgtgaccaagcattcatcccattcaccttaccctgccccatcgtagtttctggggtgctcattttaattcagtggtggtggtctgccattttttgagccacctctgctactgcttgtcccttatcatcacccttattttcgtctgttattgctgtcatgtcctcaatgacaccactgaaggcagtgactggtcgaatgtacaaaggctgatacatcatttaaccatttattgtcttcctgaagtcttgctgttgagagcctcctgtctcttgtggaagttttctgtcttgggtagcccctttgttttgctgcttttgttaatttgcttatttttctcttctaaattactatgcagtgctgggggtaaacatttattttttggtggatagagacctttccatgatttgactcatcatccatcacttagtgtgatgtcatgaaattcttttatttcacttctagacacttagaaccttttacttaaatagttttcttttcagaatttaagatattacaaggttttttttatggcatcgtgagcccataaaatttttggtgggtatgttacaatggtaaaaatatatgctcaaagcacttccctatatttcttcatttttttatgtgttcatcaaactctcagagctggtaggccggttgatagcctgggctgatacattccacaaactattttcatcaaatactatgcatcagtgtgcaccatatctctagtctaatatggtatccgagcttattggttagttgctcttgttccctcaatcccgtttgtctccatccacaaccacacgagtgcaaagcctcacattcatgtcaacaacaactctcatgtcattagcaaatctagtgtctagcatcaacacctaggtagcacttattggttaaaaagggcatttgctaggaaaaatgagcaaccactagtccactacacgtttggatgcttgacaatatgtgcgctttggtgcttgcaataataatgttgtgatggaaggtttgtcactaaatattggttagcaaagttgcagtatggggaagaccaataagctctgataccatgttagattagtgatatgcctcatcctgatggttgtgtttgaaggaatataaactggaatatgtggtgagaattctgctcatgaggacgtagtgttatgatagtcgattacgtgtggatattgtacatcgtgctgctttctgtttagtcttaacactgtattttattttggtaagtagaggtgattaaataacttgtgcaaactgccaaatatcatgttaaagtgtgaagcaataattaggtcctgccaatgtttttttttctcttgaaagaattaacttacataacacaacattcatttggttgcatttaatttttctcatatgctcatgtattcttgtaatcattgatttgcttattttctgaaacttgtgtgataattgtacaatgaatattggatggatgaagacaggaagtaaagcaaaataattaatattggatggaggaagacaggaagtaaagcaaattaattgacctcggttatggttttctcctggtatgaaacataacatgcaattgatgctgtggacttccttctttgcttgggcatagacgtggtattttcggtttaggatttaccatgctgctgactcttcataagtctattttggttctacccttgttgagctgaaagacacctttcgtactgtccttttaagatcacttggtatttctaagaagtaagaactaaaaaaatttcgaagaaaaatgaatagattagtatttgaatggagtcacgaatctgatttgattgaattcagacacacttcaggttttccttactaacttaatgttctaggaacaactccgaccagttactagaataacacaacctgaggctctgaagaagctgaggtttagatcgcagcgattaatgtaacatatctattctgactattcttgtaaatttcaaagcaattaaactaaacattgaatgacactgttttttttatataaacctatatttgcaaacaccaggtgtgagttagtgttaatcacgaggctacccttgttaccatgatctgtaagtgctattttcttgactttatgctaatatgcacatgttgcaagcaaataattatttattgtgtatctgaaactaaccatgcacatatactggaaacatgcacttttagttcaaaacagtggcatttgttatttatgcactctcatgactagactattctattaataaaaacaactcatgtttcatatattgtccctgcaagtaatcgttaccatgatctgtaagtgctattttcttgattttatgctaatatgcacatgttgcaagcaaataattatttattgtgtatctgaaactaaccatgcacatatactggaaacaggcacttttaattcaaaacagtggcatttgttatttatgcactctcatgactcatgactagactatcctattaataaaaacaactcatgtttcatatattggtcctgcaagtaattgactatcccaatcccatttgacttagtgatttcaagttgtctagttgggactagtcgtaagggcactgactagtcgactaatcgctgttagtcgtgactagtcgtagattagtcggtgactataggctaggggtacccaggataatgtatagatgtttataagtagtaattaccatagtatactagtatagtatagtataaactaaggataatcagactctcacagttgacagttcacacttgacaaggtcttaaagttaaatcatttatctgtcctagttgcaataagtccatctttcccccctccctctcttatgattggatctagatggctggttagggttagatgagggctacaggctttcctgggctgggcgtaaagcccaacacataatttttagccctaacagactagtcgtccatgactaatttgatggactagtcgtgattagtcggacaataagttttctgatcgaactaattgcttcgaagttcctgattgaggttatggtagcgataaggatgactaatcggataacttgaaaacatgatttgaggattatgggaaatacctaaaaaaaagaaggtcccaccgggatttgaacccaggttgccagattcaaagtctggagtgctaaccactacactatggaaccggatattgtatgtggtcccttcccgtggacatttctgtcttatattccataaactccataaatagttaaaaaaagtcttttgatttattttttcgtgtgcttttttccatctctttggtttcagcaaaactgttttgctttttgagaatgcatccaattagtacatgcagaatatgacctttattaaaaagttcctttcatttgaatattactcgtattgtatatctttttggttattttgtataattataggtgcacattacttttgactgtgcatgctctctgagacataacattgacctctgatttctgtaataaccatttgatggaatcttcaaaattaaatcttaagtaaagtttgattgtgtacgcatgggaacatagtgatcttaaaatatttcaaccacagcacacagtcaaatttaacacatgaaattaaaatttgcatttaatgttagttgaaataattgttaacatggagctgcgggtgagggagcacgaaattttcattgatattgaggggcagattcactgctaccaccattaccaacatttgaagtagtacagctaaaaactgctgaaggtacctattttgtctttttttttttcatgtgttcatctaactctcagagctggtacttatacattccatgagatatctttatcaaatactatgcattagtgtgcgccatatcttttgtctcacatggtatctgagcttattgattagttgctcttgttccctcaattcgactgtctccatccacaacaacgagtgtaaagaccccattcatgtcaatagcaaatctagtgtcaggcatcaacacctagatagcatattggttagaaaagagcatttgctaggagtaatgagcaatcactacacgtgtattggatatttggatgctcgatgatcaaaagtgctaggaatgtgggttttgatgcttgcaaatgtggtgatggaaggtttgtagttaaatataggttaaagaagttgcagttgggggaaaaccaataggctctgataccatgtgaggtttgtgatatgcctcatcctgatgactgtttttgatggaatggtaggttttgccattgcgcatttgttatatttgctgacagattctggaatacttattgttgtgctccttgccatcatgccatgaaaccaatctaaatagttctgcctggcacaagttaccctttttttttggtcaatgaagttaggtccggatggtattggtaatattacaatgatcagtttgatacaacaatttatgcaaatattaagcgattcagctcatggtgatgtatttatgcatttttatctgaattttgttgatgcattgtatttcattatgtaaatgcaatgtatctgaattaagttgagttttaatttgtagaggacatatgttgaataacattagactgacaatctgtcatttttaagataacattttgttggtagattgcattttactttgttaacactagttacagttcacattttaatttatggaaaattatttgtgtaataactagttgtagaacaattttgtgctgtttaattctaaacctatatgtgggaatgccattgtaaatattcagggttggtgttatacatgatgctgcacttgttaccatgactaaagtggtattttctcttgagttgtatgctcaaaagcagttgctgcaacctgcaagcaaatgattatttgtagtttagttgcattgcagatctgtcttaaccgtgcatagacttgattacttgaacatgcatgcattataacaaaaaactcatacagcatgtattggccctacaactctacaagcagttcactacacaaatcccatttgaggaggatggcaatacccaaaaaagagaggtcccaccgggatttgaacccagtttgctagattcaaagtctggagtgctaaccactacactatggaaccggatgttatatattatcccttgatgatgacatttatgccttaaaagctgtgttattcccttgtttgtttccatcagtttggtttcagtgaaactgtgttccttttgggcatgcatccaattggcttccatgtagaatatggcgttggctaaaaaggaccttttcattgaagcatatgcatgtttttgtctgcttgtaggagagagaagaagaactctcagttgttactatacaagtgaaaattccgagtttataggaaaccatcaagttgatactgatcttaaaacttatataaataaatatggctagattactgagatgtgtagtgggcgttgatggatgaccaagagcccaagactattcttacatagtgtgaagtagtacacttctttttatttcagtcatgatctgtgtcatgcatatgctcctaataccagcataggctttagacctttttaggtctgttttgtctgttcaaacacttgactgcctgtttttgtatgccatgggatacttatcaaatacaatgtattagcgtgtgcatgtttttccgtcttcatgatattagagtttattggctaattgctgttgttctatctaaccatttttcctccgtatgcaatcatgagcaggaaggcttacattcaagccaaaaatgttaccatctagcatcaaaacacaactgccatctctttggtggaacactcttgatgtggctcttcagggtaattagatgctttaataccaagagtgatatgtatgcgattttttatgctggtgatgctaatggtgtgatggaaggtttgtcagtaaggttgtgggctggagaagttgagatagtgagaagatcaatagactctgataccatgaaagcagttatgccacatgttgatgcactgcattaaactcttgcgtgtgaacaaaactactatatttcctgaatcgtgtatttgccctgcaatcaattgactatgcagatcccatttgaggagtatggcaatacccaaaaaagaggtcccaccgggatttgaacccaggttgccagattcaaagtctggagtgctaaccactacactatggaaccaggtgttgtacgtggtcccttgcttatggcatgtcttatattccataaacacagtaaaaggctggaaattttgtctattttccttttatctttttgtgtttgtttccatcagtttggttttagtgaaattgtttgcctttttaagcatgcatccaattagcgtacatgcagaatttatcatttgttaaaaggttccattcatttaaatctttttggtgctttgtgtaattactaaatatatttcttttgacagtacatgctctccaagagataatgttaacctctgatttctgtagtagtagtctaatggaatctacaaattaaatctcgaagaagttttatcatactgatgtacgtttgtgaacagagtgattatatcattggtagaatgcagcgtatagtcaaaccaaatgctacaaattaaattttggatttaatcttaggttgaaatagttgtaaacatggagcaggctaatgaggtctgaacacatgcacatgcacatgcccacaaaatacagtgggcatgtcccttatgtagtagctactttaaaaatggatgaatactttatttacagctcaatggttgtacctgacaacattgattacttggtctaattgatacaagtaatatactattctcgctgaaatttacttgatgcctcaaagattgctctgtaacacattatgtgttttctctggttgtaggtgagataagaccacagagccagtcatcgctatgtctgaaagcatatagactatttcccagctgtttacaccccggcaaaacaatgttcaatcttataaggtaactgcacacttgaccatcttctccatgcaaattttaagatcaagtaaaagtataatgtggattatcacaattctttattagcaagaaaacaaaaacaagtcttctttaactcttgtcattgtttagttatcttttgacaatttagtgctctgatatttactcaaaccttctggaccttgttattgaactatgctcaatgataaaatactcccaagtccatcctgaaattcagaatctgctttcatataaaaaaagaagctcacagcctcctcctgcctttaaacagtaaacgatgaaaaaagcagaaggatcaaaactcacaaccactgctgtttatcttgtattttgagaaaaaagagcaataacactactactgacaggtcaatctgtcagctgctcggtactcttataacatccacagtagcagactagaagtactcttatattatatttataacagctcatgtttgatatattgatcctgcaagtatttgactatctcgatcccatttgaggagtacgggaatacctaaaaaaaaacaaagaaggttccaccgggatttgaacccaggttgccagattcaaagtctggagtgctaaccactacactatggaaccggatgttgtatgtggtcccttgcagatgatatttctgtcttatattccataaacacagtgaaaagctggaaattttgtccatgtccttttgaactctttttgtttgtttccatcagtttagtttcagtgaaactgtttcctttgagcatgcatccaattagcatacatgtaacatttggtaaaaggtaaatatttgtttggatcatttgctacaacattttagcactccgtataattattaaaagtaatttttgactgtgtatgctcagagagagagagagagagagagtcatctaatagaatttgcaaaattaaatattccaaagtttgattgcgctgatgtatgtttgtgagcagagggattatgtcatagtgggatgcagtgcatagtaatctaatggtatgttgaaataatctaatgaggtgaacacatgcacagaaaatactgtgggcatgtcatgtttaaccttcttaggtagctacttgacaagcttctccatgcaaattataagatttgagtgaaaaatataatgtggcttataactgtttgttagcaagaaaagaaaaagaaacatgcgttgtctaactctttccattagctatcttttgacaatttagtgctcgttcactgataaaatactcccaactttatcctgaagttttgttgtcttctcattgtattggaagctccagcctattttcgtcatttatgttttatctgttcaacagactgttagactgctttttaatgtattccatgggatattttatcaaatacaacgcgttagtgtttgccatgtttttctgcttcatagtattactagccaagagcccacgtgttgcaatggaaaataaaaggtttctagcttattaagtcaattaagcacatatttagtccaagtaccgcttttatgattttccttattgaacaaataggtgatttcaaaatttaatgtcagtgctaggggtggtgtgacagaacaaccaccaccactactaacattttacgtagcatagataattcattggttaatttcttttgttctctcttatcctttttttccctccatctgcaatcatcagtgtgaaagcctacattcacaccagaaatatcgttaccatctagcttgaaaccacaagtgtcttgtctggaatataaagagtgctatgtatatgatttttgatttttttttatgttggtgatggtaatagtgttgatggatggtttgtcactaaagattgctgtttggagatgttgagatagtgagaagattaaatgatcaataggctcagatgcccctaaagcagggagatatgccacatgttgatgcacagtattaaacaagaacatggtgaacaaaactattatatttatagcaactcatgaatcgtgtattggccctgcaagcaattggctatgtagaccccatttgaggactatggcaataccaaaaaagaggttccaccgggatttgaacccaggttgccagattcaaagtctggagtgctaaccactacactatggaaccagatgttgtatttggtccctttctgatgacatttctatcttatattccaaaaaaggtaaaggcaggaaatttgtctatgtccttttttatcttttctttttttgtttgtttccatcagtttggtgtcagtgaaattgttctcctctttgagaaccattcatccatttggcatacacgtagactgacatttcttaagaagttctattcatttaaatctttttgtagaactttttggcacttcgtagaattactaaatgcgacttctgatggtacatgcactccaacagataatattcacccctgatttctgtaataatcatcttacagatgcttcaaagttaaatcttcggagaagtttcattgcactaattaacagagtgattatatcatatgtgaatgcaacgaatagtcaaatctaatgctatgaattaaactttggatttaatcttaggtttaagtaattgtgaacttggcgcagcctaattagagaacacatgctcacaaaatactgtgggcatgccctatgcagtggctactttaaaattcgatggatattttattttatatatacaactcaagggttgtacctagcaatatagattacttctaattataacgtgatatactattatcttggaaatttaactgatgtctcacagaatgctctgtgacaaattgtgttttttcttctggttgtaggtgagataaggccacagatccagctatcactatgtccacaaacatgtgcgaatccccagttgtttactgcacaaattcaccccaacaaaaccatgtttaaccttgtcaggtaactgcttacctgaccatcttgcacgtgcaaattttaagattaaattaaaaattataatgtggtttattttagttctttgttagcaagaaaaaagcatgtcatctaactgtcaccattgcttagttatctattgacaatttagtgccctgatatttacactacctgttccagctcttgctattatgttcactgaaaatactgtcaactccatcctgaaattccgtccttcttttcattgtatcagaatctgctttcatataaaaaaagttcaaagcctcctctggcctttaaacagtagacattgaaaaacacacaaggaccaaaacccaccaccacttttgtttgtctttaggggtgggcataaaaaaccgagaccgaagtacccgaaatgtcggtcatcggttcatagttcggtcagagaagtgcaaagactgatctttttttttcacttgttcgtttatcttgcttgagtacccgatgtgactgaactccataaaagcacagggtcaggccgagtgacccaatagtccaatagcccatttttcatggcctaagcttgtcagcccaaaatcaatttctaatcaaaagtcaagtccccactctaccacaaccctagctgtcatctatggtccatgagcttcacctgcgctcgtctccatcatttgtcgtcccactgtggaactgcctgccgcgcggccgcctgccccgtgcgcccgaccgccaccaccaccacccgccgccgctgcccattgcaggccgccaccaagccacccgtcgccgcctgctgcttgccaccacgtaccgcatcttgatctgttggccagaagaatgaggagcagatgatgtattgatctgtgagttctagttatggggtttttctttgcatcttgctaggattttctttagattgatcttcttgattttcttttcccgatcgatactgactgcctgcatgccatcctgcacgccacagagaggattggtcttctcggtccgactgaagaccgagaccgaattttcggttaaccaaactgtcggtctagaaatctatgctagtgtgttcgctttccaattttgaaagaactaaccagaccgaattttcggtctagaccgaatgcccacctctatttgtcttgtattttgaggaaaaagagcaataccacttggcctatcagtttggagtaccacagtagcagtactcgtatattatattgattacagctgaatcatgtattggccctgcaaacaattggctatgcaataccccaaaaaaggtcccacagggatttgaacccaggttgccagattcaaagtctggagtgctaaccactacactatgggaccagatgttgtatgcggtcgcttgcagatagcatttctgtcttatattccataagcacagtaaaaagcaggaaattttgtctatttcctttttagcttttttttgtttgttattgtcagtttggtttcagtgaaattgttttctttgagcatgcatccaattagcatacgtgaagactatacatttggtaaaacgtaatattcatttgaaacgcttactagaactttttagcactttgtataattattaagtgtaatttttgacagtgtatgcttttccaagagaatgagagataatgttcaccactgatttccttaatatcttgtgaagtttgattgcacctgatgtacgtttgtgagtagagtgattatgtcatagtagaatgcagcgtatactaatataattaaactttggatttaatcatgtgttgacaaaattgtgaatatagagcaatctaatgaggctagcacgtatactgtgggcatgtcccttgtgtagtactgtagctcctttcaaaatggatgaatattttgttttatatacaactcaagggttgtacctgacaatattgattgcttgttctaattgatattgtgatatattattctcgctgaaatttaatgtctgaaataatgctgtgtgacacattgtgtgttttcttctggttgcaagcgaggtaggccacaaaactagccctcaccatgtttgcaagcatgtgagaatttctagtattttactccacaagttcacccgcaacaataacatgtttaactgtttacttggcaatcttctccatgcaaattttaagattaagtgaaaaatatatcgtgtcttattgtaactctttgttagaaagaaaagaaagaaacatgccttgtttaactcttgccattgttgagctatcttttgacaatttaatgcttgttcactgataaaatactcccaacttcatcctgaaattttcttgtcttttcattgtataggaagctctgctgctccagcctattttccttgtttctgttttgcctgttcaacaaactcttaggccctgtttgggggagcttatcccagctgcagcttttcccaaaagctgcttctgctagaagctgctccaaacagtccacagcttttgagaatctgtagttatagattctgaaaaatgaactaagaagtcagaagctggagaagctgggtttcagagcttttccagattctcagaagctggctaccaaacagctgcttctcagaatctaaagctcccccaaacaggcccttagactgtgtttttatgtattccatgcgatattttatcaaatgctgtgtgttagtgtcagccatggttttctgcttccatggtattatagtgtattgactaatttctcttattctccctatccttctttgcctccatctgcaatcatgagtttaaaagcctatgttcaccccaaaattgtcattaccatctagcatgaaaccacaactcttaactggaaaatagcttgttgaaggccaagagtaccaatgtctgatttattggtgatggtaatggtgttgatggaaggtttgtcactaaaggttgctgtttggagaagttgagatactgagaagatcaaatgatcaataggttctgataccattaaagtggccagatatgccacatgttgatgcaccgcattaaacaaaaacatggtgaacaaaactattatatgtataacaacgcatgaatcatgtattcgccctgcaagcaattggctatatagatcccatttgaggactatggcaataccaaaaaagaggtcccaccgggattcgaacccaggttgccagattcaaagtctggagtgctaaccactacactatggaaccagatgttgtatttggtcccttgctgatgacatttctgtcattccaaaaaaaagcaaaaggcaggaaatttgtctacgtccttttttatcttctcctttttgtttatttccatcagtttggttttagtgaactctttgagcaccattcatccatttggtatacatgtagactggcaattctattcatttaaatctttttggtataactttttggcactttgtataattactaaatgtgtgttttggtggtatgtgctcttcaacagattcttcaaaattgattgcactaatgaagggagtgatttgatcatacgtggaatgcaatgagtagtcaaacctaatgctatgaattaaactttggatttaatcctaggttgaaataataatggacatggtacagccttattagagaacacatgcccacaaaatattgtgggcatgccctatgtagtagaaactttaaaaatggatggatagtttattttatatacaactcaaaatggatggatattttattttatatacaactcaagggtggtacttgacaatatagattatttgttctaattataacgtgatatactattatctctaaaatttaactgatgtctcaaagaatgctctatgacaaattgtgtattttcttctggttgtaggtgagataagactgcatagccagccatcgcaatgtccgcaacatgtgagaaactgagaattccctgttgtttacctcacaagttcagcccatgaaaatcatggtcatccttgttaggtaattgcttacttgaccatcctctccgtgcaaattttaagattgagttaaaaactataatgtggtttattataattctttgttagcaagaaaagaaagtctcatctaactgtcgccattgtttaattatgtatcgacaatttagttccctgatatttacactataccagctcttgctattacgttcactgataaaatactctacaatccacactgaaactctctttttgttttcagtgtatcagaaactccttttcatattccaaggggttcacagtaaacggtggaaaaacacaaggatcagaactcagaaccgctgctgtttgcattcggactttcaatttggagtaacagtgtaccttgcaggagcaaaattgatgcttcactgatgcagcagcctccctggagttttgatcgtggtgttgtagactaaatggtagggcgcatgagaatatggggtgtggcatgtatgaggccttgtgaaatatggctgagtgagccgatgtgttagtgccgtcttttagttggcaacattctgagtgaaaatagcctatagaacgttgctagtatatgttcttgataattgcctgatacattgttcttgtacttgtatgctactatgctagtgcatatcacttgtcaaatccatggaatttctttccagtggagactgcacaatgaagttccaatgtttttttcttaaaattcatctgatgtgcccttgtccataatttattcagctccagtatatgttgagtcccatgatcatgttagtctgattgagatggaggccaacaagcccatatgtggtaatgttatcctgctatggatccacgtcatgagtcatgaccaaccgaggatgaaacgaattaaggaataactctatcatgcctcgcttttctctttgctcctggaagagagacggggaagaagatgagaagcgaagaaagtctttaccacgtgggtttcatctgctgactcaatgggtcaatcatggtcaaactgttatatcggtagaaaccgcttctaaaaccactttctaaaaccaccgagcgtgaaggagggattggaggagattaaaagggattaattccatacctgaataggtgtggaattattcccctcccatcctctcaatccccttgttggtgggattaagtgaacatggtcagaagggttttcaaagatgggaaaagcgttatacccttgagttagagatgagggaggaaaaacagacttactctgagtaaaaggtgcaccgacgttaatgggccggccaactatcgcacgggcttgggccgtttctgcttccgattaggagttaaggtgcgttgctgcgtgtccatatacttgggttttcactaatatttcgtcccctgctgaagcggaactgaagaagaagaaccaccgccgtggagacgtaggcgcagcgctcccgattccgccgccgccgtcgccgtagccgtcgccgccgctgccgcgccgcggtgtcgacgaaggagccctccgcttgcggccgcttgggtggtcggatctaacatctagggtatgtaccttgaatcctggatttccctgctccgatttcatcttcttggcgtcttcatctctgggacgaacccttgttttctgtatatatgtatataataatagtcagcccgcaatcgtttctgtgttaattagctgggggccagaatttggttggattactactattagtcctgatgtgaaggtattattatatacgtcaatcttttgctgctgctgctgctgctaatatttggtttcgtgctgcttcgttaatcgtattttgttttactttttcgccaatcattgagtttataatccttgtagctattgagtttaatatcaggccgaaatcttgctgctggataggatggcagattgtcctttcctgaatttcttaatggaatagtaatccttaatcacggtgcaatcttgatagtttaggcaacagtagataaactaggatactcaccaaaattagggaattggtactaattatatatcttttatctaattgtaaccgggctatgctactctgggtgctgcatcttcttcgcgtgtgcgccacccgtatctactcccatagcgctggtccataacaagtgagcacattgtgatcatgtttgcctttccaatactgaatacagttgtgttcttcatttatgagtaattactattcactgcaacctatagaaacggtattttctttttgaattgaaaagtcactatttatgtttgcacataaatgaatatctcaacagcaacattgcaaagcttggactttatttatgtttgcacattaccaagcactgtagaaacaccacttgtgtcttaactgttactaatgcaggggtgagcaaatcaaccaggagatggaaaccatccaggcgctagaattgggagttgaacagaaaaagtcagaaccagaggttgatgagatgccaggatccatggaggatcaaaagcctgcggaaataagccaggacaaagtcgcggaaactgatattaaaccagcagtacaaactgagctggagacaagtccagtggctaatccaaaccctgcagaaacaaaccagtacacagatggggtaacttatggtgacctagaaaccactgatccaggcactacttaccgctgcaaaagatgtcgcacactcgtcgctactgaaggctatgttgttacccacaaagttggtcgtggtgagaagtgcttcgcgacgcgcaaaaagtatcatgtggatgagaaggaacccgaatgtacctgcctctttgtggagcccttgaagtggatgcaacctggttagttacctaccttggatgctgtaatgtttttttttctttcttttttggtgttgtgtgtgtctgatatattttagagttaattttaatgttttttcttcatcatagtttatttatcaacattggtttttaagtcgctcagaacacgcacaaattattttaggactaataatgaaccactctgctcacaaacgtattttctgctagtttggtgttgtgcgtctgatatattttcttctaataaaatgtattatgcattgcagtggtggaaggatatatttcagggaagatcgcgtgcaggaaatgcaacagccgattgggacaattccactgggcaggaatgcagtgcagctgcggagcctgggtgaatccagctttccagctggtcaagagcaagattgatcagtgtgagatgtgatcagtcgggtgactcaacttcaacttcattatcagtgacatcgcaatcatacccagctgtaggaaacattattatttccttctgaagcttctataggcactctggtagtaagttttgctgtctactaaatgtaagtctttgcagtccgcaccattcagattcagtgtttccttagttgcatcatcttgatgaaaataatgggaacatatcaggcaagaaattttctttacatttctgaagtaaacgaacttcacactgcattacgattgcaaacacttgcatgtgatttaagggaagagcagaacctcttgtcaaaggtgacaagaacatatctgaggatattgaggcggtggtgcgtgtgtggtggtgtatgcgcctgtctgtttttcatgtaattgtgaaaaacagattgtcctgagtagctaaatctcattttctataaatctcaaatgaaagaagtgcacgtgtctgcgactccaaaattgtgtggcctacacatgaaacgaagaaatatacatagaatttcaaaaggcaataagtcagctgggctcattaaggctcgactcatttgagttcattatcttgataagatagctcggctcggctcgtgagttggctcgttagtaaacttgattggctacttaatgacctgtatcccattttatcactttaagaacgagatttggagatctttctaatttcaaaaacgagatttggaggaagagacgtcccttcaaatattttttataaagaaattatgagtgtatttaggattgatcacggaacttaagggttgaaatcacacacctcttaccactgcactaaaatagagaaaatctcgcgtatctcagtttatatctagctccataatcctctgactcatcggctacaatattcatattcatgattgaacgggaattacatggcctgattgcaaccaaacatagggtacaacgaggcatggagcaatatacagagaatttcaggaaagagagagagagagagagagagcatccaaaactaacggcttagctcatcgccggccgccgccgccgtggcaccctcctccgcccgcggcgacatcgacgcacagcatatcggcgaggtcgcaagtctcgtacagcatcatcatctcaatctcatccatccacggcgccggcgccgccggcagccccacccccaccgtcgcctcggctcccctccacccgtcgaccccccgccggcacggccgcggcctctcgagcgacggcgcggtcgcaacggctgcgtcgttgccggtgaggcgctgcacgagcgacttgaacccggcggcgtcggaggtgacgaactgcgtctcgatgaaggtcaccttcacgccgccattgccattgcaacccctctccatggaatcgaatccgatcgaccgatgagatcagctcgatcagttgcgaccctttccccttttcttctcgattcgattcgaatcgacgaaaagctctctcaactcaaggttgctggtgacgaaatcttcccgtgccgatggggtttttatacagagcgcgcggcggcggcggcgcgaatgcaatacatacggcacagatgcctgcactatccgaatgacatgtggggtccaggttaggtggggcccacgtggaggtgagggtgtgggtttttcgctggatgtgtgactggtgggttgaagctttagcattagcgacaaggtttgactggtcgtatccagtgagtgactgggttggtggtcagtgacggacaacggtcaacctttctgggaacggtcaaggctcactccctgcctcgtgcgaggaggaggttcactgtatccttatcctattcttctctgcgttctcggcggcttcgcaccgatccggtaagagcaacggtaattaatgtcgttactcctccgttttagttatttgactaaatttataggtaaatataataataaatttataaaatgatactatttttttctacaaatttaaccaaatttaaaacagtttgacttttgaccaaagtaaaaacgtcttaaaacctgaaacggatggagtaatttttataggtatgtataactgtttaccttatttaaaattattgtataaatatataagttataaatacgattgaattgtttttaatgataaaacaacttataatgaataatcagacatatgtcgaaaagtcaaagaccgtcgcttattaaagaaacggaaaagagaatttcctgtgcttggctcagctaccgattactataatcctttgtgcaatttcatttattataattgtaagtacatttttttcttgtcttgttagcaagagtcgaacaatataagtggcgaagaggatgcgggaaagaagaccacctgctcctgctaccaagcattagtcttgaaaaaaatttgataaaaaagttatcttcagacttcggtctcagtttctgtctgatccttctccaccgagcggttttcacaaaaattgatcgattttcacgaaaccagtagtgtcaattttagttggtatttttacgatgttgactgaaagctattagtttttatcggttttaggtcggtatacaataaaccggtcaaggatggttttaatattaaatacggaaaggtaaaacctgccttcacctccaggctccacattatagctggaggtgatgagggagaggacccatctccctttcgtatttactagtatttagagttttctcaataaaatgtttggaggatttgttaatctacactaatcgctagtccgtattgcatggatattgttattcctatagttggccataaggtcgaggcccgggccaaggcacgggattttggcctggcccaagcatgacatggcctgatcgatgtcgggcccgtgccggcacgacatggttgttgggctgtgcctgggcctatgcctcggcacagcacgaacttcagggatgtgaaatagacttttcaaccatatgtaagatatgtataggcctgacaaatcttggtctgggtttgaccaggcttaggccgtgccgtgccgagcggcccatatggctaactatagttattcctattcttttccataattttgtgaaaaagtttcgaaatcgatgaaatgttggtgcccactgaaattaccaaaatttcggccttttcggaaagtataaaccctgttgtgactccaaaatcctttgattcatcggctctatcaatttgttttttttttcagtttcatgattagaaccggaattacatggcctggtcgcaaccaaacatataaaacagggtacaacaaggcatggagcaatatacagataatctcagttaaaaaagaatggaacaacatgcagagagcatccaaaactgaagatggactgagctcatcgccggccgtcgatcagcatggaaaaccaccgtatccgccgccgccgtggcaccgtcctccgccgctcgcgccgacgacgtcgacgcgcaacatctcggcgaggtcgcacgtctcgtacagcatcatcatctcatccacccacggcgccaccggcggcggcacggcttcccgcttcaccaccgtcgcgctcgcgccgccggctcccctccacccgtctgcacggcacggccgcggcctctgtggcggcgccgccggcacggctgcgtcgttgccggtgaggcgctgcacgagcgacttgaagcccgcggcgtcggaggtgacgaactgcgtctcgatgaaggtcaccttcacgccgccgccgccgccgccattgccgttgcaacccctctccatggaaccaaatccgatcaatcgatcggccgacgagatcagttcgatcgatcgcttgcttaatttacgtctcttctcgattcgatcagctaaagctaagctcaacgcaaggttgtttcgtgacgaaagctttcctgtgcaggggggatttatatacgacgctggtggttggggtcaaggcggcaagaaaccaacgacgactattccaaatgcgacaagaggagacacacgctgttccaatgacatgtggggcccacggctcgaggttcgaggtgatgagtggaagtgacaagtggaggaggtggtttgactggtcagcgaggggaggaaggcaacggtcagcttttgggaacggtcaaggagggctgggctttcttctcctcgtgacaaaaataggttgtggctggctcgctgcctcctctatccttttccggttttccctgtctgtgttcttgcgacttcactgtgatggtagacgtacgaacgcacaacatctctacacccgcaataccacacttacacacatatgaatatgatcggcccgtaacacatgcttgaaaagacggaaaatcaacggtatatacctaatatcgccaaatttattttaagatctcacttatatatacgtaatatttatggataccagaatttaaaccctgatgagtggagtcatgctccaccaccacactgttgatgcttttctcaaagagggcagctacacaacgggataccgttgcaacgggatattttaagtgactttctcttttcctttcttctgtccacgtgtactcccctagtacctggtacttgatacctggtaccttaggtatcggttggtacctggtacctttgataccgactaggtatcgaccgatacctgatgcccgatacccaaggtatcgggtggtacctaggtatcagaccttggtactaaggtatcaagcctgatacttgtggggtatcagagggtagcgtcaaaaaagaggagacgtgggggagggagggccacaacggcgaaggatggcgtcgaggaggcacggcgaggtgagggacatatgctcccctggtacctggtacctgatacctttggtaccgactaggtatcgaccgatacctgatacccggtacctaagataccaggtggtacctaggtatcagaccttgggaccaaggtatcaagcctaatacttgtggggtatcagagggtatcatcaaaaagaggagaagacgtgggggagggatggcgtcgaggaggcacggccatggaggatgttgccgcaaccgtaccccgttccggctccactgcgcctcgctcccactctccctctcgctcaccgcgcccgccgccgagctcctcaccgtcgccacctcccccgcggcggtggccgccagctctggcgagcggtgggcgacgacgatggggagggctgcagtgccgcctgatttgggggaggagagtgaggtaggaggaggtgacggggagggctacagtgccgtgtgatttgggggaggagagtgaggtatgaggaggggatccggatgatttggagggagaggagtagtagaggagatcccgtctccacgggatgccgtggtgtaggttttctgtttctcaaaaataaattggtgtatgttccatgctggaagaaaatggtactccctatagtttcataataattatcgctttaaataaaaaaactttactattattttttattatgagatatataaagaatatttatattttaagattaatctatacatgtaatgtaactgctatttttgtaaagcaaatatttttaaacatagtcaaagttctaaaaagtttaacctcaattatgtgtaaaacgataattattatggacgggatcgaatagtatgtttgtcacttatattagctatggaccacggagtataaacccaaaatatttagttataaagaccgtttattgaaagtaatttcaggtcgacttttcactacctccggagccaaggaatgaaaataacaaataaatcccttaaaatgacaatggaacgtaaaatgttttttaaataaaaaatgttttagatataatgcatacatgaatcaagcgagtagactcgtggttatttaactagtatggcatgtgcgcggtatgcaaggggcagcacatgcgttgtctcgtttaatttgtttgatcatgactgcgtcctcccacgtatgcttcaccaaaacttgcgttcaaattacaaattcctttccagtattcatgatgagaaagactagtactatatactcctacatatatagcaatgctgattttgtcaatgtagcagtccatatatatattctcatcttggcacaaattatttgtaattaatttgaatattgccaagcctttgttgaaacgaatagccagctagtagcgtgctacgtatgagcgacaccagccaagcaaatgacgaattgaaccggatccggaaataatattcaaaccatttggatcatgaattcatgcacacactcacaccagtcaaaccttagctgcatgtgcagctgctggttcccatgaatcctcctaatctcttctcccttttcagaattattggtaccaaaagcacagtcaaatgtagtacggatttattgacttcttttttattattttccccagttgcaatcacttgaaagtgagaggtgtcagtgacggcatgttcatgtttctagccttgtggctacttcgaagaagtgaagaaaacttgaaaaggtcctttctgtctttctcgtggtcaggctgtggttgtgctgtgcatgagtaggaactaggaagccagcatttttcaagttatcaggtcatagggaaggatttcgatgttttttaagttatcacctacaaggctacaaccaaattttagattttaaaacttaattttggagttaattttaatgttttcttcatcatagtttattttctgaaattgatttttaagtcgctcatagaaaagtttcacgcacaaattattttatgactaataagagttatggcttataaccacatgtaggagaaacgatggggctcgctccacaaaaggataacagcaatcttgaattgcagtggattttagaaaaaaaaatactataagtttctgttagtgatatgccctaaagacaatcatagagatgattgtatcacatactatgtttacatatttatccgacattgttccttgaaatagataactcattattggttaatgaatatgtgattctttcatgatactctttatgttgtttgttactatttctaaaggatccctgatcaaatatcatatgtggaacaaatatgtttatatgatcagcacatgtattaattgatgatcatgtctcatggatcatggtatagagataccaaattaataatgtggacacatgttggtgaacatgttgttggatagacccaacatgagatactgcaagagccatatgtgttgtgtcatcagtgatctcattgagtgttggtgttgaatccttaaacctgagattatcatggttctcaacatgtgtagtagcttacttagggactactaaacattactccgtaattgggtagttataaaaatagttttcgggtatgctatgaaacatgtagtgggatatgaataatcaagatgggatttgcccctcctatggagagatatctctgggcccctcgatgttgtagattatggaagtgcatggccatgccaaaggtgattgaggagtcaatcacaagttatataatctatcaacaggttcgagtgaatgattgagctattagaggatggcacatatctagccttgagcttaatcgatatcatgaggcaaaggggttcatacaagtatacactagaggttcagccgatatgatctttatgtatgcccggtgggtcaatacgttctgctaggggccgctgttgacgcgtggaccgaaaaggagttttcgggttacagccgagtatatatgaacctacagggtcgcacgcttaatgggccggaataaggggattggatagagatccaatatgagcttaattcggataaggatccgaataggagtcctacgggtcttggaggcccgagtgatggatcctatatattcgtgaggggtgtgaccggcggaggtattgcatcacgtgagtaaccctagccgtcacttccctccccgagcaaaaccctagccgcgcgcgggtgctagcacatctgcgtgtggcgttccgtccctgtacatgtggataccggtagaggcgccgctggtttgcggtgctgatcgccgtgggagtacggcgaggagaacacacgaggaggagaaggtcgagccggtgcgatctactacttcctctacatcgacgcgcgctacttcgcgagagttccttcgacttctcagcgtcttcttccactgcacagcgcgtcgagtggtaacgatctatgatctaatacttgcatggttcctggtttacgtgatagaaaattttgatttatgctatcgtagcctacacgatcccaatagcttctattaacttgaattcagtaatatatttacaatttgcaatctaacatcaatacagaaagatccgagccacactctgatgaatgaagattcagcactatcatcatgcaagttgatgcaagttggtgaggtgcaaactggtttctggattattcaaatcttttcctcggaggatcagtattttcgagagccacgatggctcgaaaaggattgcatttggaaatgctgaggcattcacaagtccaatcctctcatttatgtgccccaaaatgctgatgcagcggtgagaggagaggggcaggacagttcccggccctagatgtttgatccaaccacaaacttttacttctacatcaaaaaaccaatccttgcttcgaatgtatataattgtttgtccaagttcatagaacttaagttatttggggacggtggtgtactctccatcccacttcatcccaaaatataataaattcgtccaaaaatgtagcaacttaatactacaactagacacaacctcatctacatctggaataatatgttagctacttcagttatattttgccatatttaatctatattcgtaataatatgttatctaattagtaacactagtaatatgcccgtgctaacactacgacaatatttgatacaattcatccttcaaccaaaggatgatagcagtatgtatagtagtattgttctctgaatcacagactttggttaatgacattatattatagttatgctttttttcaaacacactattatcggggcacattttattcataggcaataccataatatgctatgcttcataagtcaaatttcatacagatgaaacaaaggaaggaccgacaaaaatggttgttttgtagtttccgcagataaacaaaaagactccgctagacaaatacggacagacacatcctgtaagtgggaagaaatagcaccagcctcatctatcatgttgcaagcccgcctcgggataacctcgttaagaccgtgcagaatatgctgcttgtccttcctgattagtttcttatagttgccaaaaccaaagaatataggcactgaagatatcgataacctacctgcacatgctaaatattccaatcaatcggtatagtagctgagaaacaactctgataaataaaaaaatagtgcagcccggataatattgagagaattcacctacaggtgcattaatgcacacaccgtgatcaattaccatatctccattcgcttgatacagtgttgtacaaaaaaaataaacggctggtgcttatgttgtgtcaagggttgtacaacgtcagattgaggtgcttaggaaattaatccatcctcaaaacgtggacacaaaatagtctgaactatagaatagaacaaatataataaaaaccggtgctttttgcaggattttttttaaaaaaatcatatgttaatgcaacgcaagaactctgtacctgttgtgagctcttctttatactcacaattccttttcaaaagttctcccttgcaatgcctcttgcaatcccagatttttcaactctaggtgataagcctaaacataaaaaggattgcaattaatctctaaacaactaaaatatcatttgtggtgctacaacaaacttacaaatttactacaacaaactttgctgttgcatcctatgtatccttaccttgccgaattattttcgtggagaagaacctgttcttgaactgtactgtgcccactttattcttttggttacagggaattgttgcactccctgcgtaatccatcaagtagccccaattttagtttcccattggcaagtttattaaataattgaacgggactaattaagaaacacactgaagaacatcatgaaaaatatcattttaaaaaaacattaatttgatcgcagatgcagccgcagcaaaagcaaccttagccgaagccttcgtattaacatcacaaaaaaacattaattcgtatttcctcctccacattgttgattgatttaatgctgaaaccttcggctgatatcacttgttataaaacctgtccggttagcatatcggaaactaaacacgaaagaaacgactactgccttgctccaaacatgtggtcactggtcagaggtcccaccatccccgaaagttgcctcctcttgcaaagatggaaaaaaaaaacctattaccagctaattgttgtgcttcaataatcccagagcaatgccaatataatactaactgcgccatccatcaaaacttcaggaaagagctgagaacttgctgtcttctcaaaaccagtaactaaaaatagaatcctcccagcagtaaatttttatctgtgaaagcaacaatacttcacgtaaacttttgtttgccgagaaaaccagtaactaaaaatataatcatcctatcagtaaatataacccggtaaaacatgagacacatggctcaatgaatttacagcctactctccgcaatacaaattgcatttgggtattcagaaaacatggttcagtgttttattatatagcatactaaatggaatcacacatcaatgaggaaagcaagaagaggaacctaccaaccttgtggacaacaatgtcactgaggaagaacttctcagtgaatcgaatctgccgatgcttacagccattgccgatcctgcagagtcatgaaacccctatcacctatcacaagattaaaacacaaaccgaaatcctagaaaaaaccactctaacatatcatctacaaccagattccccagtttacagccctgaaatcatcgagaaaccaaacctccccaagttcagtgacagataaacaagcagataaggggcagatcatccaagaaacaaagagatatggactaagaaccgtatgatcaaatcagcgggtacttttttttagataatggaagctttattaagactcggtcaaatacaccaagatgatacatttcaactgagctcacccccggcctctgcataaaatgcacacagccaataaaagaacaaaactaaacccccatcacgaaacatagatattagtgactatcaatccgtagactagatcgccacccatgctcctgggtaaaaacatcccgtgccacctggtccaaacgtcgagataccaccgcaatagtatcccgcaatcccggtttgtggaggatagcccaggtacgcagccactgggtaactagagtaataacctgtaaaggagaagacactaacttgttatcaaaaataaccccgtttctgaatggaccaacaaagagctgctgcacccatcaaaagcagatttctcatttctttaggaacacataaaagccaacgcccaaacatatgagtaacatttcgaggaggttgaaagttagaggccatatgaataacggaccataccaaacgagatagatgaaattggaagaacaaatgttgaatggtttcatccttatgacaaaagcagcattttttactacctttccaatttcgcctagctaggttatcctttgttagaattactccccgacgtaagtaccaaaggaaaacttttacttttagcggtactttaatctttcaaatacgtctattaatattcgggacgcccgtatgaacaagagctatgtaatgtgaattgaccgagaagaccccattgggggtgagattccagcgaaattcatcttgctcttgcgtcaacaccaaatcagctatgcaaggcaatagattattccaagcagctaattttgctccaattaaatctcgtctccatgaaaagcttggagggttcgtttgaaagatttgtgatattgtcgattgtttatgcctaactatgttatagagacaaggatattgatctctcaacgaggcattacccaaccacttatcttcccaaaaccttatttgagagccgtccctaatacgaaaagacccaaaccgaaaaaaatcttgtttggccttcataagactagcccaaaaatgtgagtctcctgctttccaataagcctgagataaaggttgtgatcccaaatatttattacgtatcaactgttgccacattccgtctgtggtaagcaacttgctaagtaacgctatattctttacctcgaggtcatgaattcccagccccctttgatctttgggacgacagatgatgtcccacttagcaagccggtattttttcttatggccatccccttgccaatagaacctagatcgaaggtaatcaagttttttaagtaccccactaggtattgcaaggaacgacatcatatacattgggagactactaagtactgagttaatcagtgtaagtcgccctcccaacgaaagaagttttcctttccagctacttaatttcttttcaaatctttcgaccacttctttccattccgcatttcttaacttcctacaatggatcggaatgccaagatatcgaaaaggaaaattgccaacctagcaaccgaagagttgggcatactgatctctatactcaagcgtttcgccaaaacaatatagttcacttctatgaaaattgatcttcagacccgacaattgctcaaaggctagaagcaccgacttcatattctgagctttctcaaggtcatgattcataaaaagaactgtgtcatcggcatattgtaatatagacagtcccccatcaatcaaatgcggaatgagaccatctacttgcccttgtgttttggctctatttatcaaggtagctaacatgtcaacaataaagttgaataggattggggagagatggtctccttgcttatatgggagagggtctccatgtcaacaatcagcgggtactaatagggatagaggagacatagcagggattgggaataaagagaatgggagaggggtgggggcggaggatttgtgtaccttttggcagagcagaccaagatggggcatactgtggcggtgacgcttgaggcagtggaacagcacagcatcgatggaggaggcagcgcgtaatgtcccgttctccaaacaaacttacatctgtcagaagaaacaaaaaatgttctcatactttttgaaatttcagtcagcgtgtacattcaaacttatacgatactattcaattataaaatcatgtcaagagattttttgtttaaatgaccatcagacaagagcaagcttatatgcttgatccgatttatataactttcatgaacaatagagagtttatcaggaacaattgcaggttgcacatgctttttatcaattgggtatcgttcgggttgtgcactcaaaggcttctgcgcatgcttttcatcaagcgtatcaaatgtcgaattttatataaatattaacatgtaacagtgatacaaatttatattttccaatttacagtacatataacagattaacagtgcagtgctcatatgactaacatcatcaccagtgataaactcacacttataaaacctaagaaacatcgtcacttattcaaaaatacatggtaaatataggaatcccattctaaaaaattctgaaaacttgacaatccaaataggaacgccattatgaaaaaaatctaagaacatcggatcccatagctagcaaagttaagaagggaatagtgaagaaactggttgtaccttcagagaatgagattgtgaaggacagtagcagctgttcacagtgatacgggaatggataatcaccgatgatgctgtagtcaaaacttgtaaaatgtgacaggaaaaattgcaatcagttgctataggaaaatataaatttcgcttaaaatgtcttaaaactaatcaaatccaaacaaatgtacagttgatcaactccaagtgatagtgtacataaatattgtgctttgacaaatatgcaaacaatgaactatatcaatgctaatgggttttctttttccaatagatgaagcatgaattttttgtgcaaattatacagtaaatatgctcacatgacaagttatcgatgcaatgttttttggctgcatggttaattactggttatctcgtgacaaagcagcagagggtgattttatttttcttccagctacatcaattcttctgttgtgccttttataggctatagtttgagcatatttgttatattttttaaatgaccaacaattgtcaggaattatatttccaatcaacaatatgctatatactcaagcatttgaaattatatttgtataggaaatctggtcaaaaaagaaaatgaaattcatcaaacatcagaggtgagggttagaaattacccccacgctcagatcagttgatggttacttcataatgctggatcatataattatgatggtgcctcccattcaacaggtttctgacaaacaatgcatcagctatcaatgtagaccaaaagattcagcaatatgaaagttgaattagggaaaccattattgatcaacctataacaggaaaagataatctgcagcatatcatttatacccccagctttttcacataagcattttaacaaacacaaatcgtgcacacacctgatgggggcagggaagcagcagtcctccgcactgccataggagtaggcatcgacggcgggggaatcggcattggcgtcggggaggagtcactgccaggggtggcggcgtcggtggcaggtgggcagaaggaggaaaggcggggggacagcgtcggcggcggggaggaggagaggcggggggatcctgagcggcaggggcggcggtagcggtggttagggttgggaatcgcgagggaatcagcgggggcggcgacctgaaagagagggagggcgtcggcgcaatgggggcgtggtggagagcaatgggcggcggtgacgatggtgggtgccggcgcggcgatgtgggggaggcgtggcgcggcgatttttcgtggtacggaggggcgcgtggcgcgaactgtggaggaggagcgcgtcgattctttcaaaaatccggcgcacgacggcgagagggcgagagagcgcgaggaggagatacggcgctgggcagtgggagacgcgggagagagaggagcgaaagcgagagcggcgtgaggagatgggtgcggggaggggaggaggagacgtgggggattctgaggcgttagattataagattttgaaccattgaatgtgttacatgatgaatgagtaaaagcattcattgaattatagggtagaagattttgctatatttcatctatattcatgataatatgttatctaattcaataatattttactactccctccgtcccaaaatgtaagcatttttagctacagattcatagctaaaaattgctattgctatgttttaggacggaggtagtatattttaaggcgaaaagagttccaaaagaagtcgacggcatagttcgactccgcgtgcacagcaattcaagcgcatgagcacatggcaagcacaagaatacacaaggcatacggataagtttaacacaatacaatgccatgcagcaagtctaaggtttcatcacacacgactcaaaatgtctccatccactgagaagcgagcacacacaatggtgacgatccaagtcctccgctaccaaaccacgacagatgctagcattacaagttttacaacaagcccaaaagggtttttacttaaactggtccggtctgaccaacaagaagctagagaggatgtagcacagcgtgcgcagtgttcttctgttagtcactgcgggcaggagacccgtcggcagacctggagcgggatcctggaggcgatcctgaggattgcctgggggacctccggtgcggaggggatccatcgctgtcagctggcggcgacctcctgtgaatataaatgctttcagtgtatgaccagaaacccaagaaggcatttcatgaggtaggtactacctccatcccagaattaagttaatctaatactggatgcgacatatcctagtactatgaatctggacaggtactagattaagttattctgggacggagggggtatatttttatatatatcccataagtaacgcacatacgaccaaaatgactacatgagtatgcggaaaatattcgaatgctttcccctaatccaacagcaaggcacaacagccattcaatctttactggaatatcatacactaaaagtctatcgtatgctactttcaaccatttttgaggcgagaaaagcaaaccaatgcagaacttttgcattgcaaagagcaatggaagtaagaagcactcgaacttacttttcataaccattatcagcatcacgccggtccccatctttattggcaggagaataggatctccgcttcttgtctacttcatgttcttttggctgacgcctaggagattttgcacgatgtgtgtcttttctctgtggggatgcggaatagtcatctcgtcgtcttggagcaggagagtatgacctttaaagaaaacatgtaagtgagagaatcatgaatgaagataatggcttaggaatcacatatagcaacaaaaagtaaacaggaactataattggtctaccttgaccgtggacgaccacgataacggggagagcgggaacgcgaacgtgaacgagacctccctgtaagaacagatggatgcctcagtaattcggtgtggcaacaaaataaattagaaaattacatgcatttaagaaaagaaaattaacaaaaacttgagattgaccaatagtactaatctgaaatctgaaacatacggttatgtgtgcagcaaaagggacaagtattccaagcataattacagagcacacaagattctagatgtgcatttagaaatgcacaagatcatgaatgatgagaaatgagagaataccgtaatgggatgaacgacggccttcatggtcagagtaccctctgcaaagcaaccacacaaagtcattgtaaacaagcacaaaacagaatattaagccgcacgttcaagcagtaatgggaacaatacctgactctggctctactgcgcatctcttctggccttttccgtgactcagcagcaagaacaacagttatctcccggccaaaaaccacctgacgattcatatgatattgggcctcagaagcatcataagggtcaacaaactccacgaatgcaaaccctcgcggttccctgtatatgtatattttatgagacagttgtttgaggaaaattgatggtaaaactaacaaataagaaggtgcaaaatgttcatgtgtagtgtgtgtctgccatgttaccatcacagttcaaaactcaatgtaccctctatgattctcagtgaagcacagttaaaaacttacgaacatttccagcaaaagggaagcaagtgttgcaaaaagcagttagatgtccaggctctattatctgaatttcttgtataacactacgtatggtgatcctcataaagagcatcttcacagaagcattcgcttcaagttcccgaatgtgcgaaaagtcaagatagaacttgaaatcaacttctctcacttttatcttcgcatgcaccacccagtacaactctcttatcttctcttcgtgaaattaattttctcaatgagtcaaatcttgtcttcatagaagaacttcttcattcggacaagactctatcttgccaaacaaatcaattgttaggaatattgaaaagcattcttcaacatcgtatttacttcaatccagtacgaccctgggaatagtttcagggaaaaacttcttatgatattaagtgcgtaggagaaagaaagcaaaaatatgggttaccacattagtgaattacatgctctagtgacatgaaaaaaattactaaacacatcatcagattaaaaaaatgattcaagcatttcaattaatggagctaaatgaaaaggtgactgcagtaattgataccacactgaagctggaaaatgttcacgccaaacctccgttgtgattttttttatttccagtctattgaataactttagaaaagcttgtaagcttattgcagcgacaatacagagaagcatacagactatctacatttactatcctaacattataacaaacatttttttggcgattgccaatcaacaaaccaatcaacagagtcattagcaacactttacccggtataataatcctttggcaggtaaacatctcgaacaggtccaaacctttcaaaaggaactctaagatcctccgctctgccagagttaagagagccagtcaaattgaataaatctgcaacctccgaaatattatactccctccgtttctaaatatttgacgccgttgacttttttaaacatgtttgaccgttcgtcttattcaaaaattttaaataattattaattcttttcctatcatttgatttgttgttaaatatacttttatctatacatatagttttacatatttcaccaaagtttttgaataagacgaacggtcaaacatgtgctaaaaagtcaacggtgtcaaatatttagaaacagagggaatatttatttatttcattaagaatatagtcattggaaaaaggtgctacggttatacagttccagtacctgcagcttaaagggatgttgcggaccaggagactgccagaaccctgttccttccgtcctccatatcccctcctagggggacttcttcctctgccaccatatcccctccttggtggactgcgataaggtggactatacctcctcattgttttgtctgcaattacacgtaaatacaggaacattagcgataagaagacaaatgcaaccaaagaataactgccaaacttgtcagcacagatatagttttttgttaagaataatatactacagcgtaatttaaaagtatagggaacaaaaaaacccataggtaacttcaagtacatggaaagaagtcttcaaacacaagcatggcatcatgttaaaaaggatttaagattaaaaactaccaaatcaaaattggcatagcccaatgaatcatgcaccttgcaagttcatgcgctattcacatcagtcaacaaatctgagttgtaaacactgttccaaaaattttgaattgcagctcaaatttcgaactatgactttcctttatcctttggatctaaggatacgataatggtatagaacacagtaacaaacaaatgaatacatcgatataacaccaagatccagcatattaagttgatctagaaaatagcaattactcccaaccacccacgtatccagctccaaccaagaatttactgcatatatgactaattcacgacaactctgaagcaacaaccctagccttcaaccccgacatggcaggaggggatctgagattcagaaaccttgcagctacggggtaaaaacaaatagaacattccctatctcgttaaaccgctcgtcaaggcatctccagcaagcgaaaccgccgaatcccgcgcggatctaagcggtgacgggcgagctcgctgacacgccgcaggcggacctagggttttctgtggcggcagacaccgcacgcacgagcgcagaagaacacgcatacgaggtacggagaaggagggggggaggagccagggttaccgggtgagtacgcttgccgccggcgaggctccgtcgctgccgctgccgctgccgccgccgccgacgcgggggtggggagggtaggcgagttggcgagggagaaagcgaggcgaccgcgaggcgagagggagagcgcgtctcccatagataagagaggaggtgggtgggctcttttgggcctgggctttaatgggccgtacgacgttcactgtttcggcttttcaggcccaataagctgctaagggctaacgcgtccacccggccataccgaacagctctcggccctcgggcctaggaagaacatttttctatctttttattcttggctaaataaccaaccagctgatgaatataccgtgcattgaaaaaaaaaagctgctatataccggaatccgttcaaaaacaggatgataccagttagatatcaagtcctaatagactaatacctaaccggtatcaggtgatacttatcaaatatcatgctgttctaccacgtatcaggtgatacctatcaggtatcatacgattcttaccacatagaatgtgatacttgcgagatatcaggtgatacctattaggtatcatgtgattcttatcacgtaaaagataatacttgcgagatatcaggtgatacctattatgtatcatgtgattcttaccacgtagaaagtgatactttagaggtatcaggcgatacctatgaggtatcaggcgatacctacaagatatcatgtgatttcaactaggtatcagaagctggacatacctgatgccgacgccaacgaccgctaccgccctccctcccctggctctaaccaccgccgctgctcctttcccggctccggctaccaccgccgccgccgcctctccctcccctagctccgacaactgccacccctccctcccatggctccggccaccgcagccgctcgctccaccggatgcagctaccaccaccactgcccctccccttcctagctccggccaccgcagttactccgttccctagctccggccaccgatcgacgcccctcctttcttcgttgatgtatcccccaccggcggctcggacgcgacgcaccgctgcctcgacacgacacagacgaggtcctcgacgtcgcaggagctcaccgtgtagggctcgtcgccggtggccgcgtcctcctctcgccgagcaggtctttttccccaaccgtgccgaaggtcctcacagacaggcgacagcaacctcctccttacggctcaggcgctcagctctcgcttctctttggataggcaagaaggacgaaggatcccatgccgacaggatccccgtatgtagcattcccgaaaaaaaatcgcataggaaaacactaaacatatggtagaagatggattttatcggtcttacggatctatatttggattatagccaccagatatctctatctctattgttataaaaattgaaaatgtttttaccggtattttggtacatcattcgtatttgagtcgggttttaaattttgttcgcttttggaaataaaaatccgtgtttgagtcagattttaagtttgtttgcttttaaaactacagaaggagtcgtatgagaaatctctttagaaaaactcgcatgctaacttgagatgaaagtcagacttctaattgcagctcatgattttttttaaaaaaatatccaagcgaattcctaaagtgaatttcatcctagataaaccgtataacaataacatgattaaaatagcattcacccgttgcaacacacgagcatcttttctagtaaatataaaagtatagtagataagaacggaacggaaaacccttcaacggaaatagaagatgttggactttgatccaagaaagacagtgtcttatctacccgtatctcacaagggctgctcgtggtttacttggacaagttatctctacccacatataaatactccaaacttctcccgcgcctcaaaagcacttcaccatcgcccctcaaaagcaccttgccatcaccacctctacaagcaatcccccctgcccaacacgtcatgcagcgcaaaatagagttagatctggcatacctgttgttgacctcatcctctctctcctctctgattcctccttcaaacatgctgccctaggcatccactccctcgcttggatgtactttctgctttctcatctgcttagaaggcaccttgccatcaccatcactgccaaacatgcattcttgattcacccacatggccacatcatgagtggagggctagatcgaactggactgagctattgtgatttttttgggttgaaccactagtcttgtccggttttaatagctatagattgcgtaggtgtagcttgaggcatctatgatcacacactccgatgacaataaggtgtgtgctcgagtgaggggagttcggttgtgggcctttggttggccctaagagatggaggagagagtcgaaagagaaaagaatatacatatatatatatatatatatatataatgaatgataggtgtgtctagatagatctttttatataaattgtctttcttatattgttgattagatagcaaggagatataattcgtccggttttaaagttcacagatatcgaatgtttgttgttgtagttcatgggaaatcggactacgctcaaagtttagggagtaaatcaaaactgttccttttgaaaattgaggttgaaaaacaaccgtataatgactaaaattggatttcatccttcttaattttgcactatcaaatttctgcattccaagcatgctgcaggccaagaaccgacctatatgcaatgctacttttgattggagatcactcaaaactgggagagtaccatctctacacagctctcccttatctatcatcactctcccttacatatatcgatcactgcgtacatcacttaaattgaatttgaattcattaataaaagggttattttaattccatgcatcgatcgcatggcacgatgcaacgcatccatctaaacgagaaaaaacaggatgttgctttgttctcaagataattgcgtgtgcgcagcaattgttaatgagaaaaaaaacaattagcagatcgaaaccctagctaagctagctctatatatacagttacattatgtactatatggcgtaagcaagatcaaggtgatcaatgagcagatcgttaattagtcgcgtggagcatgcacggccttcgaagcacacaacaacacagcaatgcgtttgcatatagaacgatatgatcgatgatgccgcgtttgcttttgcacgacgcatagcccgatcggattgtgtgctctgcgcgcgtctaattagtacgtaattaatctcgcatcagcatcactaattcaaatgtacgataaaggcttttctttctttcttgccgaggacgtacgatatgattgtactatacaaattatagtactttctactccctcaagtcaaatgtatttgatgagaactttcacggtatgttaacgtacttggaagtattacaaattaagtagagtaatgttgatcgttgataagaaagaagtaaggtacgaaataaaattattgtaatcgataaaaattgaataattaactagtaaaatatagatattatatgtgaataaaaacatctatacgtgtatcgatattgtcctgtagaaacaaagtaaatcttccaaaaagttaggaccggttcagtttgacgccattttcaaccataccatttttttggcacagttgctaaaaaaatatctatatttagtttgttgccaaatttggtaaatacataagaaatacttctacaattttgataatattgtatcttgccaatattttgacaacgctaaaatttagtaagatttattttggctataatctgaataggaccttatattattatattagtggatttgattggtctgcacgggataaaaaatgtaggcatcccctttctccatgtggtcatgcctctccctgccttccagctctactgccgctaaccacttccgtcatcaacaagttcagggaagacgattctccatcggctatagctaggatgtgttatggcgcgcctacactacttaaaaaatattttttatactgtcaaaatcgaatttagcaagcggatccatacggagatatataggtggtccgcctacacccagatgtcaaaaaatatttttgcatacgggtagagcaaccatatgcaaaaacggtattgctaattaaaaaactgtcgcaagttttttaggcaaaaaaaactttcaaaggtaactgtgtaattgcaatgtaattacactatagttttattgtacctacattgtaatccctatataaattagatataaagttgcatatattatagtaaaattatattacaattatactataattaggtttgaaagtttttcccttaaaaacttgctgttgttatttagatagtcccatgcaaagaattgtatttttcgtatgtgaacgcttaagcctaagccgtactccgactaaaaagaaaaattgacaaaataaatccaaagaaaaatccatccgaaacgctggcatctcatgtgctcggggttcatccccgccgtcaccgacaccctccccacctcccatcgccgccaccagatccgccgctgacgcaatccctatataccgtcggatctgccgccatctccctccccaccactggatacgccgccgccaccctccccaccctcggatccactgtcgtcatcctccccatcgcccgattttccaccgccgctgccattcccaccattggttagggactaaggcagtggatggtcctgctccatctccatctctcggactcctcccgccggcatcggttttgctggtgtgggccggtttcagcgtggatggcatccaaagccttgtggctgccttcggagttgggtgacatgaagctcacccgctgccacaggagttgggcggcttgggttgcgtgtggcgtgagcgaatctggcggtggtggtgtgctaattgttgcggtggcgaggtctcggggatggcggcaggacggcgatgttatgattccaattttataaaactctagtggcactcagtagatattatgaatagtaatatcactttctagtttggcacatttataactttatgtacttcctccgtttcacagtgtaagtcgttgtagcattttccacatttatattgatggtaatgaatctagatggatatatatgtctagatccattaacatcaatatgaatgtgagaaatgttagaaggatttatattgtaaaacggatggagtatatatcaaattaaccctaattgtttgtgtgcatgcatgcaccagctcgatgggtattctgaaacaaaaactgccccagtaacttatagtgaatttttatcaaaaatattcttatatatatggactacagaacttttcagacatcattccatgaaaggtgccgatcgagctgcaaaaaagttcgttgatcgctgatggcccccacaaaaccctttgcttgcgactaatgactattgaccggccggtcactggctggcctggctagctagctagtagatcgatcttctcatatatatgacccatatatccatgcttgcacgaatggttcctagctaataacaacctagttaactaaactatatggtcaaactaaatggctagcttagcggctagtttgattagtaatttattatttaattaattagtgggtatattcagatgcatgcgtactcagcatgcatacaaagtaatatatagctagtatatgcaatgcatgacggcaatatatatatatatatatatatatatatatatatactaattgataattaattaatatcaataaaattgtttttatatacaagtgaatggatgatggggggacatagaagaatatagaaatgagctgatgatactcgcacgaatggggtgtgcagggggagagaatatgggaaaggagaagcttggctcgatcctacctatgaactgtaatttgtctttatgcatgcaagtatatactcgctccgtttctaaatatttgacgccgttgatttttttaaatatgtttgaccgttcgtcttattcaaaaaatttaagtaattattaattcttttcctatcatttgattcattgttaaatatacttatatgcatacatatagttttacatatatcacaaaagtttttgaataagacgaatgtcaaacatgtgctaaaaagtcaacggtatcaaatatttagaaacggagggagtatatgcaaacctgttcacaaggttattgtatatatagtactggttatgtagtgccactgggactgctaattaatctagagaggagagaggagagactgagctgagggagaatatataatttgttgggaaggaacaatataatgctagcactttcaaattccttctcccctctctcacacaaagaagacataggacgaagacaaggaataaaaagaagatcatcgtctctaattggttgatccatggcttagtaatggatgaagtaataaaaaaatttatgagtaaaacttttatacatgtattattcatattcagaagccaatatatgttgaaaaataaacaaaccctcttacaatgatcagctctaaaaaattaatttttcaaatttaaattttacctacgactgataaggataacagagaaggcgaaaaaaaagtatattcctcgctgaagtagtgaagtatccaacattacacttggcagttgccagaaacaggtagtgcataagcaatgagacagtagaaaacggttcacacttttgtgggggaatattgtacaggttgttttttttctggttttgaagtaaagtatagggtttagattccaaaaaattattttttgtaaatgttatttggtttcactggtggagaaaccatctttcgtcggtcggccgatttccacaatagtcccggatgcaataaaaaccggggctaaagatgatctttagtcccggttcaaaagggtaacgggcatatttgatctttagtcccggtttgtgttaccaaccgggactaaatatcatctttagtcccggttcgaatgctgtcaggacctgtcaggcccccccgggatctttagtcccggttggtagcaccaaccgggactaaagatcttaactttagtcccggttggtaataccaaccgggactaatgatcccggtgatctttagccccggttggtgctaccaaccgggactaaagtcccacccctatatatatgtcttcttcctcctccagctgcccgagcaagcttcaaaatttcttcaaaaaagaggggaggtcatgccaaagtttctattgaatttattttggtgattacatacaaatcggaggtgcctaaaaggtttgcaacttcatcctccaatgttttttttttgtcatactacatttgcacctatgttttgcacactttttttgtctccaaaatttagttgtaagttgatgagagagaaaatgtgtgtggggaagaaagaatatatagaaatttagttcatttgctaaacaaggttttataaaatagttgagaaggaaaactctagtgaaagttaatattaaataatagaaaacaaactaaaataaaaattaaaagaagtaaaacacattaaaattagtttaaaactttacaaatagtttttaagaattatttggtgtaatattttatgatttttgtatgaataaagatatcttataattattgtatgactgtcattattgtaagaataattatttgtgtgcggtttttttgactcatgtagatggatcggcaatggatgtacgctgaccggcggtccaaagagtttattgacggcgtgcactattttttgagagtggccgaagctaacaggcaaaggggttttatttgttgtccatgcaataagtgtaagaatcagaaggagtattctgcatacaggactattcatttccacttgtttgagtcagggttcatgccaagctataattgttggacatcccacgtagagcaaggtgttgaaatggaagaagatgaagtggaagacgacaatattccagactttgctcagtatgttggatttgaaggaaatcaaacgggcgaggaggaaatagctgctgatggtaacgacgttgcggatgatcttggtcagatgttgcaggacgccagggaagactgcgaaagtgaaaaggaggcccataaattggacaagatgttggaggaccacagaacttcgttgtacccaggttgcgagcaggggcacaaaaagttggataccactctggagttgttgcaatggaaggcaaaaaatggggttagtgacaaggcatttggcgatttattgaaactcgtcaagaacattcttccggggggaaacaaattgcccgagacaacgtacgacgctaagaagatagtctgcccgttaggactggaagttcataagattcacgcatgtctgaacgattgtatcctatatcgcggtgaggactatgagaaccagaagcatgccctgtttgcaaagcactacgatacaagattagacgggacgatccaggagaagttgacgggcagctaacaaagaagagaattcctgctaaggtgatgtggtatttccctataataccacggctaaggcgtttgttcaggaacaaggggaatgctagaatgttgcgatggcacgctgaagagcgtcaacaggacggcatgctgagacaccccgccgatggttcgcagtggcgaaacatcgacagaaaatttaaagaatttggaaaggacgcacgaaacatacggtttggtttgagtacggatggcatgaatccttttggagagatgagcagcggccatagcacttggcccgttacgatgtgtatctacaacctcccccctggctatgcatgaagaggaagtacataatgatgccgattattattcaaggccccaagcaacctggtaacgacatcgacgtgtacctaagaccactggtcgaagatcttaaacagttgtggaagaaggaaggtgtccccgtgtgggacgaggacaaataggaggagtttaacctacgagcgctgctgttcgtaaccatcaacgattggcctgcacttagcaacctatccggacagtccaacaaggggtacaaggcttgcactcactgtatggatgaaacagaaagtacgtatcttaagcactgtaggaaggttgtatacatgggtcatcctcgattccttgcagcaaaccacccggtacggaagaaaagcaagcacttcgaacataaggccgaccaccgtacgaagcctaaacatcgcagcggaaaaacagtgtttgctatggttaaagatcttaaagtagtgttcggaaaggggcctggaagccagcatatagagagcgaagatggtcacgcggcgatgtggaaaaagaactctatattttgggagttaccatattgggaattcttggacgtacgccacgcaatcgacgtgatgcacctcactaagaacctttgcgtaaaccttcttggcttcctaggtgtatacggaaagtcgaaagatacactggaagcacataatgatctgaagcatatggaacaacgcggcgaccttcacccggaaccaaaggagaaaggaagccattacttgagtccagccagctacactcttagcaaggcagagaaggaaagtatgtttgaatgcttggagagcataaaggtaccgtctggatactccacgaatatcaagcgaataataagcacgaaggagaagaagttcacaaacctaaagtctcatgactgtcatgtgttgatgacacaactgctaccagttgtaataaggggtatccttccagacaatgtccgggcaacaataacaaaactatgtgcattcatgaacgcaatttcgcagaaggtcatcgatccggatagattagaagcccttcagaatgaagtggtgcaatgtctcgtcagttttgagttgatatttccaccttcatttttcaatataatgacgcatctgctttgtcaccttgtgaaagagatccgtattctcgggcctatgtacctacacaacatgtttcctttcgagaggtacatgggcgttctgaagaagtatgttcgtaaccgtgctcgtccagaggcaagcatcgccaagggttatggaacagaggaggtcatcgaattttgcgtagaatttatcgaagaccttcgcccaatcggggtacctgaatcacgccatgaagggagactacggggaaagggaactctcggaaggaaagcaataatgacggtagacaacaatttattccgtaaagcccatttcactgttctgcaacactcttcattggtagctccttacatcgaggagcacttggctctagttcgcgccaggaacatcggtaagtccgatgcatggattacacggcatcacattgatactttccccgcgtggctacgacaacatctcatgagtaacgagtcgatcaaccaacaacttgccttcctggcgaggggaccgtctgggtcgatcgcgacattccagggatatgagatcaatgggtacacattctacacgagagcccaagacatgaagagcacgaaccaaaacatcgctgttcgtgtcgatgccatgggacacgatggaacaactgccacgtattacggtgccatcgaggacatatgggaacttgactatgatcctctcaaggttcctctgttccggtgccaatgggttaggttgactggtggaggcgtaatgattgatgacagtgggatgacaactgttgaccttaacaaggttggatactcggacgaaccttttgtccttgccaatgatgtaacgcaagtctttttcgtgaaggacatgtctagcaaaggaaagaagggcagagggcctgatgagcctaagcgtcaagtggttctcccaggcaaaagaaaaatcgtcggagttgaggacaagactgatgaggattacgatcagttggatgggcaaccccctttcacggtgacgattgaccctagcatcctcctatcaaatgaagacaccccttactcacgcagcgatcacaaggagggaacaatagtgaggagaaagtacgtgcggtcaaccgtcaccgccgatgtaatgccgtaattattgtgtacacgatgtaaactattttggatgtattgattatccatataaatcaattgatgtatggcatatgttaattacgcacgattattagaggtttcaacaagtttaaatcatgtatatgttagttatatgtgatacttacaatttttaaaagttttaaatcacacaggtggcaatttcatatgtatgttaattagagtttttaacatttaatttactagcattcatatgctaattataattgactagaggatttttaaaagttttaaatcacgcaagtggcaattttatatgttaattagagtttttaacatttaatttactatcattcatatgctaattataattgactggagaatttttaaaagtattaaatttaatatatttttaaaactatcattcatatattagagtttttcacaatttaatttactatctttcatatgctacttatatattactattcgaatttttaaaaggtttaaatcatgcatgtggcatttacatatgttaattagagtttttagcatttaatttaatataattcctacgctaagtacatatgatgattacaatttttattaattttaaatcatgcagtatgtacattaatatcttaattagagtttttaccaatataataatatcattcatatatatgctaagaatatatatatattggaatttttattaattataagtcatatatttgcttattacgatttatccacttaatttattacagacaaaaataatttttcgaagtaattgtcatcaatctttgtactttaaataatgttaatgcattaacttctattttataaacacatatgtaagcgaaaatcatatgcagtgctataatctttagtcccggttcttaaccctaaccgggtttaaaaagaatttcgaaatagcgggaaaagatatttactcccggttgttgagaacaaccgggactaaagatcttttctttactcccggttgttctcaacaaccgggactaaagatatctttagtcccggttgttgagaacaaccgggagtaaagatccaggggtatatatattcccggtgcgccctcgtcttcttcaccaacacttaaacgttttcggccgatcgatctctctcggcctctctccttcgccgccactgcctagggcaaatccccgcgccgacgccgccgtatctcgccgtcgtctcgagctcgtcgtcctcgccgccgcctccgcctcctccgctgccgccgcatctctggggtgagagccgccgcatctcccttcatgcatctcgatctctccgatctcgatctctctccgtcgccttcgacgccgccgccttcgacgccgcgcaacgccgccgccgcatgccaacgccacgccgccgccgccgtcgccacgccgccgccgccttcgccgccgcgtgcgcaatgccgccgccgccacgccacgccgccgccgccacgccacgccacgccaccgccgccacgccacgccgccgccgccacggccccacaacgccacgccgccgccgccgtcgccacgctgccgcgccaaccgccgccccgatgccgccacaccgccgttaacgaacgagaacgagaacgatcgaacgaacgagagcgagaacgaacacgtgaacgtacgttgccgcgacaacgtgaacgagaacgagaacgatcgaacgaacgtgaacgagctagggaacgtgaacgagcgaacgaacgaggacgaacgttaacgtgaaatgcaatatatatatatatatatatacatgtatatatatatacatgtatatatatatatgttacttcgcatttatcctaatacattttttttatcttgcagaaaagacgtgttgtcggagtcgtccgtcaagcctgagtggaagagctagccctagaaggaattggagcaggcaagtgacgtaataatataaatgattgttatatttgtaatgcaattaattaagattattagacctgtaattagacttatcatataagattgtgtagtgttctaatattatttgagttttaatataagattattttattgcaaattagacttagtatgacattattgactacggaattggtgcgactcctaggaattgactattgtagtcttaattaaacttagcatatacgcacgaaacacttagcatacattactattttagtcttagcatgtaatattatttgagttttaatataatattactttatttgtaattagacttggtatgtaattattgactacggaattggtgcgacaagtagcaattgactattgtagtcttaattagacttagcatatacgcacgaaacacttagcatatacatgactattttagtattagcatgtaatattatttgagttttaatataagattattttatttgtaattagacttagtatataattatttactagctagggttatataatatacgtcacctagacttagcttatatcacgatttgtaattagacttagcacgtaaggttgtgtagggttctaatgtacgacatttacacttagcatacatgacttagattgttaaaacataaatgtctcgtgacttagcagatgtttcttgtatcaacagatggctgaccgcgatgaggaacagatattgtacgatacaatcgcggagggaagcagccagtactggaatgaagaagaggggaacgaggatccaaaccagtacttgaacgaggaagggaacgtggagagggatgcggaggggaaccagcaggggcacgtggaaagggatgtggaggggaaccaggaggaggaggctagtggtagtcaaccctccgttggacagaagagggcacgcgggcaacgaggtgcagcgaagaagcttgagggtcggcacatcataacggaagtggaagaagatggacgtcctagtgccccggccgaagccgccaagaactatgtacgtcacagcggttgggttgtgcgggataacgtgcctgtcagtacggtgtactggcgaagaacaagggcacgcggagatcatgagagctttgtcccagattcggagaaagagatgctgtggaccacaatgctcgagacattcacccttcctgcgggtacagaggacaaagtgaaaaggtggactctgaagaaaatggcagaacagtttcagagcttcaagggagatctgtaccagaagtatatactgaaggggcagacaccgaacttcgacacattcccaaagctaagggatcactgggacgagttcgttgcatataagacaggtgaacaagggaaggcgatgatggaaagaaacaaagaaaatgccgccaagaagaagtaccatcaccacttggggtcaggaggctatagcgtcgcgatgccgaagtgggagcagatggaggctagcttgattgagaggggtatcgaaccggcaacagccaattggccggaacgatcgaagttctggtactatgctcacggtggaacgctcaacccagctgatggctcactggtcttcggctatcagatacaagaggctgcgcgacgattaacagatgcagtggaagcctcctctcagggcacgttccgaccagacagagatagggacgagctgacactcgccctgcagactccagagcatccaggacgaactcgagggaaaggggtgattccttggaagattgctttcaaggaggacatccacacgtacaggagtcggatgaggagcaagagagataccgaggcgaagattgcagacctagagttcccggtatcgagctacgaactcaacatgcaagaggaggtggcaaggaaggttgatgaacgcatggccgcacatcggtcccatgatccccagccgaccattcctcctgcaatggtgagcccgtcaggaaaccgtagcagctgcgcctcaacggggcaggtaggatcacagagcatggacgccatgcaaacacaggacgaatcgacctgtcccgttgatgacatcactcagcggacaccatgtgagctgcatattcctttgaagaacttatcaataaaggtaagatttagccattccgctagttgctgcttatatatgttgattactaataaataatctctcacaacatgaaggtggcgtcgggcatggccatcccaacggacccttcaggtacttaccactgcaggccgattccagcaggatactccaaggtcgaagttgagttggtcgaaggcgcgtacgaggacctcgagctggattaccctggaggagacggtgagacgcatctacgagacacatgccatgccattattctatggcgcaggcggtacatcatcctccctgggcgacaagcggcgtctcgtgcaccatctcctccggctccgccatctcctcctcaggatcctgcaccgtctcctcctcatgctccgccagcaccatctccacctcaggctccagcatcgactcctcaggatcctgcaccgactcctcctcgtgctcctacacctactcccccgcaagctcctcttccggcaccttcaaagtcaagggcccccccagctccaccgcttgcccacataagggcaacaaagaaggcgaaagttgacgccgccaagaacaaggacccggggtacgattgcacgcaagaggagcttgacgcttacgttgcatcagaagtcaagagacaattcaagcctcgaagtccagaaaagaagattcctatagaccccagtgtcaggaacttcttcagggggtatgtctacatctgtcaaggaggccatcaagctatcggactatgagcgaacgctgaagaaagcatcttctggaaagtccaaaccagtccctcagcttggagagcaaccaaaccaggagatcgagccgttggtgaccagtaaagaaatgacgatagaacaatttattactgacaccggtctaactacggatcaattgctaggagtcgcaccaatcgaaaaggcggaagtgaaatacatgtacgaactcggtaaaccgcttgtcaagcctgagctgctgcagtccctacccacacaaatgtacaagttccatcagttgtacatggagatgagcgccaccggtagagagatgatcggagcgaggattagggacacggacttcttgcaaggagatgacattctctggatcaatttcaggggaatctacgaactataccagctggacgccctcgacatctctattatgagttgctggattttgtaagtatatcgttcagttagatttcttactatacgtctcctttaattaattaggtccttgtatataagtagaccatagaaaataatatactcccttttatcgttgtaaaatggagattcaaagggcccgacggcggagggttttcgatactggattcatcgaccctcggaaagtaaacgtcgcaatgctcgaccaatatccacaagaaacagaggacaatctcgtccatctcctgaaggcgcagcattacaagacgttcatactgttgccatacaacacagagttagtttaattttactgtcttcctacataccaaatttcattcccgtacgaacttgctaagtgtttcatatgtaatgcatcccacgcacattgcagattccactgggtgcttttactcatcgacctggaggcctgcaccgtcaacgtatatgactcaatggataaaaaagagtctacgtttgacaaggttttcgaacttatagacaggtaccgtcataagttcctttgttaattaagaaaatcttgttatgttaattgctactacgaatcatagctttaaactccatgtagggcttggtatcggttccgtcatttggtccgcggcaaatggagagaaagacttaggcggaagttcaaatttcctgtgagtacacatgctctacatttatatttctccgattcaaatacatacaagtgtatattaattagatctctcgttgtttgtcatttatttgtagtgcgcaaagcaaaagcagggaactaatttgtgcggctattacgtgtgcgagtattgccactgccttgcagaccaaatcatcaccacaagagagctcgatgtacgtacaaataaatttaaaatttcattacgtagcgatttcttgtttaattactaatcaatttcatacattcatatagtttattcgcatgagggataacctgaccacacacaaggaatttatcgcggcggttcaagaacaactcatgggattcatcaacgaagaaatccttgatcccaagggtgaattctactacgacggaaacacaattcaccggtccttagcttctgagctagcagcgagtactactacgtcgaaatcgtagctagctaggacatataatggattgtaattaatacatgactacatatgtttctatatgcatgtgtacacattttctataatgtaaatatattttgttcatatatatatctatatacatatgcatttgcataacatatatatgtataaatacatatatatatgtatgcatatatatgtattgaaacatatatatgcatatatatgtattgaaacatatgtatgcatatatatatgcatatatatattttttgcagcaacaggggcatgcaaaaaaaaaaaggtcagctctatctttagtcccggttggtaacaccaaccgggactaaagatggctcagccggccacgtggtgttaccaaccgggactaaagatcgatctttactcccggttatttcacccgggactaaagatagcgatctttagtcccggattggtactcccggtttggaaaccgggactaaaggggggttacgaaccgggactacaaagggtttctccaccagtgtttataggaatgaagtatatgaaaaacaaaggaaattttcatctactcaaatcacttgaagaaattcttatggattaacttgtgcatgtatttttattcctttatttttcttattcaaacaggttgatcttttttatgtttctatggattgaaattcctcccaatcgaacaagcccgaaatggatatcccaacccttaatcatcatactgatcgatctgatgcatgctcagaagttaagggtctcatcgattatcgaaaaacttattataagccgtaatgacttattagtgatcgaataataatttatgtaaaatttttatatatgtgttcctagcaagtaacgttaaaagctcatgtaaaaagaaactacgttaaaaatatcttaaaatcaactttagaattaaaattaagttttaaaattcaaatttcagctttagctttggctttttaggtaaccgatgagactctaaataccacacaagtatttatgtactctctctgtcttataaaatacaatatatatagtaggatgaatatccagatttacagtattaggatctattatgtcattggctatgatttatcatatttcgtattagatttgttttttataagatgaagaaaatatgttgctagcttgtcaaatactgcagcaggagcaccaaaacatatccggttccacacgtttgacctgccgggttattaaggcatgcatcgaagcgagtgcactagttagcgtgagcatccctctgcccagcaatcacagatccctatatttaagatttaaccgaatattaccactactagaagtacttgttttgaaaagctactacagtaaaaataatagtgagaatttgacatcatctataataataaatctgaataatctcatttctagtttcattatgttcgattatgttaaatcaccacgtagcttgtttgttttttatcagatgaagaaagtaactcagagtagcagtaatcatgcatggaacttttcgttccgtttcacgatcgccagtactcgaccaacacaggtattatataggtgcttgaatcttttgtagataaagattaaatgttttacacaaaaggaggtggtgataacgtgtaattaattaagttttaattattacaaacttgaaaaatagattaatatgatattttagagcaactttcatatagaaaattttggcacgaaacgtactgtttaaccgtttgaaaaacgtgtcacaattatccgaaattttattcaactctagttggataaaggagcgcagatgttacgtgtatgggtcggaagaaaacgatcgggaaatgatataatttctacataatactctccgtctatcgggaataattttacatatttattaatttaattatttagtggtgactttaatatgatgttgataaaaattagaaaaaatataagatttatatttggctagaattttgcgaaaatgattctcactaattaatatcgatcggtcgagaatttttgctaccattttcatccatgttactggctgtcccaatgcagggtagagccagaagtttttgaaaccctaggatcaaccaatataatttattacatctttaattattttcataattttcttaattaatttataagggattaaggagatatgcctagggctcaaatcctaattaatagccttaggctgcccttgtctcaatgtattatacatatttaatactctattatcaactatcaagcaaaaaagtatcggtcagaccgacggcaaccaggcggtcagaccgacaggacaacttcggttagaccgcgatccgtcgaattagagggaaacttttattttcgctaaaaattttcggtttttgggtataccaaccattcactcctctctggttggcttagttattgtgattcgatcctacaagaacctcaaatcttctcatgcactagccatggcttttttttcaacaaaataaacatcttgtgcacaatggcaaattgcatgtactccctccgtttcaggttataagacgttttaactttagttaaagtcaaactattttaagtttgactaattttgtagaaaaaagtagtaatatttttaacccaagactaatatattataaaattttattcaattatagatgtaatgaaactatgcttgtgttgtaaatattactacttttttatatagagttagtcaaacttagagtagtttgactttaattaaagtcaaaatgtcttataacctgaaatggagggagtatatatgatcgctacgtataaacaagcaacacgtaatctattgaatcttgaaattaatgtaggtctatttcaatcaacctttttttttcatgaatataggttatttagaacgtacagtcacattttatttcctttcttgtttgttatagccaagtaaattaaacaatatccaacataaaaatgactaccctttccaatacagaatataataaaaagaaacaaaagtcactgagctctttttttaattgttgcgcacatgtttaaaatgaagttatatatatatatatatatatatatatatatatatatatatatatatatatatatatatatatatatatatatatatgaaggagtatatgtatacaaatatatatacttaataattacagaaaaataattttgagctgcttggaaagcatttttgcggttgtgcggctcatgactcatgagcggcggtccaaaaccgaaagccaagcttgcataacgaaagttatcgaagtctttttcaattaactctaaaaactaagttgcttcgaccactgacaaataagtgacattttagatacatgtagttaacatgtttaaactttgactacttatattataatatgagagactttgtccatatatacaactatatatgcatgagtgaaatcttatattttaggatagatacagtaatagaccttcgaataatttcaactcaacttctaaaattaatatggttatactcatatttgtttcaaaaaaagtacttgaaactaaaaaaattataattcttagatatgtttactggttttgtattagtaattaacaaccaaacaaggtgtgagcagtaattcataatgaattatccagcagcagtagtagtgtatataaataaaatagcataaatccctggaagtcaggtcccggccgggatagaagccgcagctagctgctgatgagcgcgcggcgcgcgcacgtgcacccgcgcaggccacctcccggactttgaggcctcctgccgcttcctcccatcgccatccaccgcgacaaatcgatctctctctctctcccgatcgacgtaatgtaatattcctacaaattaattcctcttcctcatatttgtctgaggaaattaatcttcctaccaattaattccttcttcctactaccttcgtcagaacaaaattaatctagtatggaatgtgatatttctaatacaacgattttagacaaacacatatgttcaaacttataatagtaggaaataccacattccatattagattaacttatttcgggacggaagaagtatttcttctatttttttaataaaaggaaaattagtcttccataaattaattaattccttcaacgtaccgcgtacacatcccgtgtaatgtccactgcacgtacacgctcaatacccatcttttccggtggccggccggccggccgcgggcgacggcggcggcggcggcatatgatcaatcgttatcgatgtcgaccaacggcgccggccgccgactgcatgccagcttgggaccagcgggccggccggtatggagcgacggtgtggcacgtcggcgccggcgatcgaagacatgtcgccgcacagccggagcacggccggaaaatacatagctggctacatgtgtatagagctagtggcatgcagcagaatatatacgtgagtttactcaatgaaccagactgatgatcatgcgtgcaagttggagagactaattggagatggtgccgagatcgacaagtattttacgtagagttaatttttcgcatttctacggagggagagagatcagtaacttagggtgtctagttcacgttaaaattgaaagtttggttgaaattgaaacgatgtagtgaaaaagttagaattttgtatgggtagaaaagttttgatgtgatagaaaagttgcaagtttaaagaaaaagtttggaagtaaactcggccttaattatattattgcgatcgatcgacttggtaactaatgcataagtcaacggctagcttaactcacaagcaagcttacgattcaatgctagctcgatcatccaaaagtgatagctgatcgatcgaacccatatgtttttaatttttttctgtaccgattgaaaatatacgtccaaatctaatttgattaaagttcattcaaacttttcaatctaatcaggaaattctattctaaacacagtcgaatagaaattttaggatgatttttattgattgttgaatgaatttacctagagttttcgttatttgttatctaataaaccatactaatattagcctcactacggtgctctctactagtagaaaacaatataaaccattgatcatttgatcgaagagtttaaatctatttatactaccatctagttagcggtagtagagacatggagggatattattgtaaaaaaaaaggtgtggggagatataattgtcatttagcagtgactaaacttttttttttcctttttttggctttttcgatgaaatacgagtgatgctagcgcaatggatgatatatcgatttagctaggaaaaaacataaatgacaaagtaattcttaatcattgtattagtaaattactaatttacccctaataatacgtactagtgatataatactataaatagagagcaccggagtataatatatagtactcctatgctaccccaactactggtatagtacgtacaatttataaatcaacaatcaattaagatcattttattctactatactagctactccatccgtctcaaatataagtattttagctataaatgctagacaactatgtgtctagattcataaataaaagttgttatattttgggacggaggtagtagtagttaggctaccataaaagctcttccaaagataaacttatagccaaaatatatagggaaagagtaccaagggtggtctctatgggtattatagctagtagaagtgacttcaacattcttactatatgtaaataaaaaagaaattctattaccaataattgagatgaaagtataattagatatgatccattagattagaaaagataaatggtatagatttatttctactaccactagagatcattgtaaaacacctcatatgagaaaatagttaatatctggcaacacaaaccaattaagcagtacacacttagttagaaaccgaatatgatgtgtggcatttgttggaattaagctagcttaatggctaggttaattttgaggtatcttcaaccaactcacgagggttcaaatgctaaatttttttccatgcattttgatgcctatgacaatattcaggcatgtgtagagaatcgatgtgtatgagtgtgtgtagtagctataatacggtgcatttatttacatatttatatgtatccaattgtacttaaaaaatcgatgtggcatttatcattcaacggatgacaaattaaaatgggtttttaattgtcacatgaccccccatttaattcacaagaagtcaaatatcaggtttgaatataatttcagatcgtatcacacgcgcgctaaccgcaatgtttgaaccatcacaagatctctacttgggataagtaaattattatgagtgataaccaatgcaaaagttgaatcctcacttgaaacaataacaaattactagtagcctttaggaatagataatgaacaacatgtagggaatagaagagagaatagaaatggaatatggaataatggaatgcagggcttaattccctgactcccacaaggctggtcaaaggatgatctaaagttgttttagtttatttatgaactatatataaaactttacacatgcatgcgcatggaccatcatatcatatagaacctaacgtcttctcctttcaaggaataaatccaaacctatttggctagctctctgtcagttgtcacgcacaataaaacaaattaagcttcaagaaaatatatactacattgcacgtagcaattaatgatctctagagagggcatatatgcaaaaaaagatcatcactatttgcagatggagacatgtcattgctccttatgaggccatttttgtggccggtgcgtcccctggtccaaagacaacgctcctcctttcctttagtccttccaaaaccggccatgaccaatgcaaacacactgtcactgactgaccatgcacaaatcaaatcattattcacaacagctaatctccatcactctccctacatgccatagtactactttatataaccccatgtcatgtcctttgggtgagcatctcaaatcagatcatctcaagttcccaaaccctagctatctctgctggtctcccccaagctctcctttatataacacaaactacatcatctcctttctcttgtgtgcaacatcacaaacacaacctttcactcccatcttggctttctttcctgtctctagcttagctacctgttgcttccaagctgagaaaaaccaagcaaaagaagctgtttgtgtgcctttccaaggtatagatttgcatgcatatacactttatcctgtccagttagaaacttatataaggacttgtaagtttctttactgaattaaggttaagtaaacttgctaaatgcatgagttttctgatgcattgtgaatttgtgggtatttctcagagtgaaaaaaaaaatgcatcctaatggcgcgccgctggccgtgccaccgggtttccggttccatccgacggacgaggaattgctctactactacctgaggaagaaggttgcttatgaggccatagatctcgacgtcatcagggagattgacctcaacaagcttgagccttgggatctcaaaggtataaacacatatgcttgctaattaattaactagcacttctttagaaaatgaacaaacttacaaatgtatatgttgtgttggtgcttaatttttttcacaaaatcacctaacgattttaaatttaactttatgaatatattgattaacatatatatggttgcattgatgcagatcgatgcaggattgggacgggggcgcaggaggagtggtacttcttcagccacaaggacaagaagtacccgacggggacgaggaccaaccgcgccacggtggccggcttctggaaggccaccggccgtgacaaggccatcttcctcggcagcggcggcggcacgaggattggcctgaggaagacgctggtgttctacaccggaagggccccgcacggcaagaagaccgactggatcatgcacgagtaccgcctcgacgacgacaatgtcgacgtcccggtaagcaccatcaccattctaatcgatttcaagctagatagtttagatcaagtagagttgagctctgattaatggcggtttcttggaatgttgcattggatgcgtgcaggaggaaggatgggtggtgtgtagggtattcaagaagaagagcatccatcagaggggcttcgaccagccggacatggcggcggcggccgacgaggacgagctccggtaccagctgctccacggcgcgggcatgtcgtcgtcgccggtcgaccagaagcacgtgctcctccaagagcagctcgtcgcgcacggcgcccatggcggcggcttcgtcgtcccggcgttcgaagcctccatgcacctcccgcagctcgccagcgccgacgcggcgccgtgcggcggcggcggcggcggccatgtcgcgttcgcctccatgaacccgctcgacgccgccggctgcggctcgcagaacatgatgacgatgaagatggcagcgacatccggtggcgagatgctgctgatgagcggcggcggcgtcgacggcggccgcttcggcgccgccgccgactggtcgatccttgacaagctcctggcgtcgcaccagaacctcgaccagctcttccatggcaaggtcgccggagcgcatcagcagcagcagcagatggccatggacgccgcctcgtcgttgcagaggttgccgttccaccattacctcgggttggaagctgcagatcttctcaagttttctatgtagaaattttttagctatatgtaatgtagtatctgcttcttgattaattaagcaggcgaattcttgtttttttttctcttctagttttgtcaaattattagtactagtttcagtttgataaggttaatatcggagttctgctagctactggcctactgttctataagcatgtgtatacagacagtctgaatgccgtatgaacttctttctaaatgtttcaattcaagtttgttcatctcgaattactaagcttgtcatctataagcttgtcatgtgtagggttgaaagtgattcggataatttccgaccgaccggaccatttttcgaatacggatagtttcggtcggatatattcggaaattttcggatatggaaacgaatacgaatatttttttgcggatacgaaaacgaatatgatatagatgatatccgcggaatcggataacggtcggaaactatccggtttttttcaccgatatccgacttacaagaaaccctagaagtctccaattctccatccattcagatccagtccactcccagtctcccaccgtccagtcccagacagagtcccacaggcgcacgattcctcacctcctcatcggccggcgccgccgtggggccaagccgtcgtcgcctcctcgctgcggggccaagccgccgccgccgccgggaccaatcgcctcctcgcccagtcgccacatcgccgccatcggagcaacccacgccggctctgccgcgccccattgcctcctcgcgccgtcacgcgccacatcgccgccgccgggccaagccaaccaacgccgccgccgcggcgccccatcgcctcctcgcctgcctcaccgtcaagccccaagatttggtatgacttgtagagtcctcactgatttgatttgtagagctcctcactgatttgattttgttttgtgtatatgtgttatgtggcagatttgtgatgaattcctctcatgcaagtagcagcagcagcttcagcttatgcagtgcgagtgtagcagcattgcaacaccaactcagcattgcagacttcagagtttagactaaaaagattggttgacagtatctggcatgcctagtagtgctttgccttttcacttcacatgatgatggatggtatttcataatatcagtatgtccaagtttgtggttgtttattattaattgctaaattttgaaaatgttgatatgttctattagaaaaaataatgagttatatttcttcgttgatttgtgatgcttagtttgaggggtttttatattccgattaatattcgtcaccgtattcgtttcgcttcatatttgctccgtatttgtatttgataatatttgattctgttttcatatccgggtattcgtatccgattccgattccaaaaaaaaaatgaaaacgaatacgatatagctagtttccgaccgtattcgacccgttttcatccctagtcatgtgctccttggaagcgcgtataaacagaacggcacacacacgcggagtaagctagcgtagattaactgtggtgaaactaaactttgacaccgatactcgtatttatgtctatttattttctatgataggtgatgtatttgtcaaaaaaaaaaaagaaaaacgagtcacccatgttaatttcattaattttaaaatatgccagctcagtttttttgaggtatttataaagggaggatgtgcgtgtacatattcatagggtgggtgtatagcgtctatgtttgtactccgtgattgctaaagaaaaaaaaaagaacggcaggcacgccttcttgaagataagtgcaagggcaatttgaccctcaaaaaatgcgcaaggctgattctaattaggaggaataatcgagtgatacagtgactcgccactggccatgaggttcgccttgttccagttacacttcacagtcaggaagacatggcccacatgtccgtcgcccaactccatccgggctgggcttgctttcatgtgggttttgctcgtggcccgagcgtccgcactaggccccaaattaatatgggccgaacgtcagtcactgttctgttctggcccaaactactatggcccttgcgtaagaaacagtagtatcggcccaaaagtaacgtggccagtacgttagccatagtccatttccggctcactaacatgggctctacgttcgtcagaatcgtctccaaaaccagcaaaggagttggtttgggggttttcgaggatgagggagatattatacatggttttacggttgagggagacgattcaactagaagcaggagagaagggaggtacactattctgttttagctgaaaaaagtaaactgtgggccacacgtttcgccgcaccactgccatatgtcgctgcggcgcaagctacaaagacatttccaattctccatcgattttattcgtctatactctcaaatagttataataaatcattcagctatattaaaaaaacatgatctccccaagtacttcaatgaatctcgctagcatgatcgcgagagaaagagagataatccacatgtatatgcccttcgtcgtactgcatccagtaaatatcgttagcaatggaaaggttcattttgactccctcaattatgatctcaatttaattcatatatgttaaccttaaaaccatgtacattgtcacctttaagtcttttaactgttcaaactggcttattttgccaccctgagcaattttgaaagtggttttatcctacgcggcatattgacttggtcccccatgctaacatggtgcttacgtggcaactaaattcggacaaagattaaaaaaaatggtgggtgtggtcttcgttgcgtcacccacatcatcagcattagatggaggaaacaacatgattatctacgacagtagcagcgaagagtaccgacggtggtggtagtggtgagaggaggaggcacactcccaatcagggttggaaatttcggaaatttttgtcatttcggacccctccgatacgatattatttcggctaagtttttttaatttttcgtgaattttggtaatatttgttcaaacttaactaaattttgttcaaaattttagaaatttcggatcaaaattttggtatatcggtgacctccgatcaaatcaactaaacttaaaaagtaaaccctactcccaatcgccctcatcacaagcaaggacatcacacatccgttggggccatgaaagggagccgtatgcggtgggtgaaggcgttcactccccgttctccctccttcctcttcatggtgtccttgagaaagcggatccacaacactgacctagccatcatgcctgtagtagctgcacgcaaggctgcccgccaagcgtgtgtgacaagagcacctatcctccctgacctccggatccacctaccacaaggtgtgtgtctctgcggcaatgtcaggcttctctacccacagggtgctgacatccccttccttgctgccatgtcaggggcagctagatttcatgaagtgttgctcaatctgctaccagcctccgccgtcaccaagggaccacccccaccgctgtctccgctaccactttggggagggctccacgggggcttgatgctcttctagttcttcgttgtcacctctttcacccttgatgcgctaagtgcgtggtggctaccgtctagaccctgggactctgccatcattgagggaatggggctctccatgtcactttgcccctccttgcccgctgccggcctgagcatcaggagacctccgccttcacccccagatactcgaatctctctacgacaacgacacgaccttagaccacctctgacacctcccaacgcatgccgcatccagggacctcttcactgcccacagtaggcccccctcctgtagcgcaccacctccctctgctccatctccaaagctcctggacaacagagagaggggttgttgggggggggggaaggggagagagaagtaagaagagctctttaggttgacacataggtcctgttttactttaatatttttcccttgagagattgacatgtggggcctctatatcttttatttttagttgctgaccgttaatggggcacgtaagtgcaatgtaggacaaaaccactgtccaaactgcttggagagtaaaaaatgagctagtcttgatagttaagggagccattatatctcttgtggttgtgggatatgaattagatttcgactaatagatgagggagtaaaaatggactttatcccattaccaatccactcgtgctgcactctaccaggcttttgagcttatctgttgtccaacaccaatgttctgttgcttcatctccttttcccaaagcttgcaagccaagtaaggggatgtcagcaccctgtgggtagagaagcctgacattgccgcaagacaaaaaatgtgtgtccatggagaagcacaaaaatgttcaagcacaaaaatgtctaaagcacaaaaatattctccatggacacacatgacaaagctcaaaaatgatatcctactttcttcatcaaacaagggcacaattcttccttctaggttttttataccattttaccattgtccaatttcagaagatctggcaatacatctatattcaaggcctcctttggagggcttttgggagctgtgatcactccaagaatcttcagctctttccaaacagtccaaatttgcacttcaaaaatgaattatatcagcgccacgggtacgaggtaccatgtgcacctcctggttatcttggagggcatgatttacacccttatcataggaaccaacaaatagtgtggtctgcgtggtagtgggcctaaccaagagatgatcactctagaggctcatgagatcgtaaccacaactacaatagcgaccaaaactagctagaagtggtcgatagagacagccaagcatggtagcggagcaaccaccaagtagagtgggcccccgcacagtctcgcggccacctcttcaatagcgtgactattctcgatggcctcctagttaaggaggatgggtgggcatagtatacgctagcgtaccccgtcatttcacattaaatgcctatgtttaccacggagtcattccctattgaatgcaagcgatttggtccatctaacacacctaacccaaccatcatcacctgcccaggtttcgtaagatcatataaagcatgtgtgccattcgacatagcccgatcgatgaatcgggaacccatgggtacaccatgacaaaggacatggtagtataggcaaaagtggcatgggtggctgctggcattgtggcatatgctttcacgccctccatatgtatataaggggcacacaacacccactaaagagggagaaagacaggaaagtacaacacactcgcacaatcatgaaatggctaagttgtaacactcatccattccacaacaatatatctgagcatgaataggatcgttatcttaggggaggcctgaatttgggtaatttgctctttgttcatcggtgagattagtgtgatcactgctctcaaccccgctgccgaacacgcggaccatgaactagtacgccgaccactactcatcaatagtttagtaccaagagacgacaaacacctgattttcttttttccaaaatcttactatttgccttttaatctccagctcttcaaatagaggaacaattctactgtcaagaggagatcccctcgttgttgttggcatgtcattcaaatgattataaaaaaattcaaaaaaatcaacaagatagattaatacatgaaagattactctacaaacatgcaagaatagagtacagagaattcttgtgcaaaattttcagtaaatgtctaagcacaggaggtaaggggaaaaaatgtgtgcccttaaaaaatgtctgtcgccctataaaaagctcttgttcaatcctatttaacttccatacatgaactaattaactaaattaccgaaaactttaaaaatagagaagcaaattaagaaacaaaccaacggcaattaagcaatgtcacgaccaatgatgtacatttaattaactccccttaaacatgagaaccttttgcatggttccatgaggtcaatcaaacaaccccaactccaagctaattacaggtaaacgagcgacgatgacgacgacgacattcatttgtctagcaaaatttaaaactgtttcgacgaatttttccaaagagcgaactaatttgatccacggataaaaaacgaactaaagcgatcgatgaagctgaagaaaaatcattccaagaagctagcaacaacttctggatgagatctctctccaaccttggcatggttgatttgattgagcttacatcatggccgagctgctgtcgatgaggccctgccatggcgttgctccggtggcagcggcggcgttgccgccgatgccgcctccagcgacgacgccgccggcggcgctgttccagccgtagaagtagtccggcctcgacgccgacgacgatgcgccgccgccggtgtccttcgtcatcacagcttcgccaccgtcgccgccgccctgctgctcgtctgcaccaccaagcgccggcggccactggcctcctcccagccccgccatcacgctgccgtcctcgccggcgttcatcactccaccaccacctcctcccatcgcatgattggcgaacagcccctgcatcccatgctgcatcagagaaccagaaaatggcggcagcggcggcggcggcatcagcatgccattgccggcgccggtgatgagaggcgcgtagtagctgcctccgccgccgccattgccgcccatctgatggctgttgccgacgccgtcgaaaagccctccaactcccctcagcatgtccatgaacgacgtggtcgtcgacgacccaccaccaccgccgggagccgccaccgccgccgacaggttgccgaacgccccgaacgaccccagcgagaggcggtcgccggcggcggcggggagctcgaacccggtggacacgaaggtcgggagcacgttggggaagtccgcgcacggcgccgccatgggctccgactgcagcagcttgctgatcgccgacgacagcgccggcaccaccggtggcgcggcgcccaccgcaggagcaggaggagacgccgccgacgccgacgccgacgaggccgacgagcgcttgctcttgcggcagccgccgccgacggggacgttgcggagggagccgccctgggtccagtagcggcggcactcgcggcagaagtagcgcggctgcgccatgctgtagttgttgtagtagcagaacttggtcttgatggagttgcaccgggggcagcacgggctgctcttcttcatcatctccgccgcgctcttcaccgccaccgccgcctcctcctcgtgctgctccgccttggtcgtcttcaccaccgtgggcttctcctccaccggggataatgcgccgccgctcgccattgatcacctcctgcacacaatagccataatggttcaaaattaagcacggtgagtgtctctacggtggtctctactggtagcattttattattggtattatcgtaggtataaacatagaagcgataatgtgatatctcaatagttgatatatgagttctactattgttaaaaaaattattctattaccgatattatttgagatggtagtataaagatatagtatgatttattggattatagagaaggtgaaatgaataagttgattctactagctaccagtagagatcctatgcaaaacacatgaagcatggtatataaatgaatatgatcacatagttaattaattacattaccatatgaaaacttcaacaacaatcttacaatcatatggtgtgggagtggtcctttgttttctgtctttttttctatcttttttaataaaatgaacatcaatatgaggaggttgattctttttcactcggatctagaccaacaacttgaacacgcactgttttttttaggaaattaataggtttaatttaatatgcgacaaaataggcattaattcaacggtattttaatctttctgccacccacgatttaaggaaatatgttgcgtcttatttttcttggattgtttcataactgttacttgcctacgaaaccaaaattgatgtgaagagaattcctaccaagaccttattttctatcacaacatacaatcatatggtgggagtggttctttcttttctttcattccttttccatattttcaaataaaaatgaacactggaattaatatggttgattttctacaaccagcaatagccacaatagttcaaagcatagtttatgtgtgtgtttatatttgtgtgtgtgtgtgtgtgtgtgtgtgtgtttgtttgtgtgtgatcaaacaattaattaattatgttaccctatgaaaaccaagtataatcatatgtgggattttgctttctttcatttcctttccatattttgaaatagaaatgagtgctagaatagggaggttgattcctttttttttcacgcggacttagcgcaagaaattgaacacaaatttctttggaggaaattaatatgcttaatttaatatgtgacaaaataggcgttaattcgattatttttagctttctgtccacccgcgattcgaggaaacacgttacggcttattttcttggactgtttcataactgttgcttgcgtacgaccaaaactgacgagataagacaattcctagtaagacttattttctatgcgcgacaaatctatgcgtgtgacaactagctacagaattctcgtgcatacatggatgaacaaggaataatatgaggattttttttgaaatagcgtacttattgatcgctcaccgcaaaatcaagagatgaagaggtttcaaaattaaactataataaagggaataccaaatcatttggatgcagcgttgatttctttcgaaacttttacaagtaattgaaccatagaccgagcaaaagaaacaaatcgatttgagatcatgctagctgaacaccaccctagaatcctagatatataggtagatggtgctggactatgaatttttgtacgcataccaagatcgatccatagctagatatataggaacccatatgtgttcatgtagatgcaaaagaacaaccgaatgaagtgaaacacatacaaatacatgtaatactcttgcgtatatatagaatctagtcgcaaatagatcaagaaatagttaaatcaaacttcttgaagactaccaacaagactatatatatatatatatatacaatcaaaagaagaaagcgaagatcttttcaacaaaaaaaaaggggagaaagcgaagacgccggagaaacataagtacctgttggtgagagatctagcttgcttgaaacaagcaaagtcgatcgaacggaggagtgaaccgagacgacgaagaagaaagaaaagctaagcgaaacgatgaagaagaggaggagcaggagcaggagggggagaaggaggagagcctcccctcctttaatagtagctatagacagacggagaggagagagccgtcgagagagatctaccccgcaagctagtgcaaacgatgcgtggggcatgtgaggtagagtcgtagccagagagaggggatgaattgaaataggtagaaaccaatgcaaacctgacgccggatttatgtggaaacagccggccacagcaacgtcatccatccaaccaaccaaccatccgtccattccatccagccagagccatctctaggctctactgctctagcatacaaatgcatggatggatggatgcatggaatggatggcttgcaagtctactgctctgtgccgtggcttgtagctgtaggtagcaacggaaaggagagagatttgggagggatgaagacaagaggcaatcatgtcagatgaaacagcttcttccggtgcaagaagccttccctggaccgaccgtccgtcgacgcggcggtgacgccgtacgtccatctccctccatgccgtttgcttggcttgttggcttcggcgaactaactgcgttgtcagcaagtgggccccggccagaagacatgcatggatcatggatgctgcaggtagtgctggccggtcaggtcatggctcgatatgatcttcacgcgtacgtcacttgctgcatggatacgtgtgtgtatgcatatgcaaatgcgtctcatgttcttgacgacgccttcctctcgcgatctctagctcccgcgtcgtctcgatctgaatgtgtgtgtgtatggtgcgtgacaagtggatgggcgtccatggcgaccatcacgtatgctggtttgtttatttatatatgcgcggattacttgcggatcgagttgaaggtataccaacaagtggtgagccatccggttcctatgatcagttcctggtgcctcacaacggtcacgttcttttcagctactccaccggataaaaaagtatgttttcttaaaaaaaaactttgaatacaatttgaaaatatacctttttttcaatattttgtgtttatatacatgcgtggaaaatatttgcacaaatatacctcatccacacaacggggacgtgggactgaggcggtgccgctcttccattccacaggaccggcggtcgcacaggacggccgtgcggcaccgcctcactcacgcagcccgggagagcggcagcgcggtgcagggcggtcctgcgtgcgactggcacgggtgccgcacgacggcgctatgcgactgctatggtcccgcgccacagcgccgcacggctggctcggtcccgcggaacggcgccgcacgaccgccttaggacagcgtgcgaccgcccttcactacgctgttgctctcccgtgctgcggaagcgaggcggtaccgcacggctgtcctgcgcgacagccggtcccgcggaatggaagagcggcaccgcctcagtcccgcgtccccgttgcgtagaggaggtatatttatgtaaatgttttttatgcatgtatataaacacaaaatatttttagaaaaggtatattttcttttttttgtcaaaaaaactttaccgtattattgggatgatttgttctaatctatttgttaagtttaatttttagaatatttatattaatttattcatgtagttgagtacgtataatctgtaacaatagtccggtgaatgcaatctccggaattgttcggtgcgaacttaaggatcgattttacgaggtattgcttggccaagaaaaatacgtaccattcatctatcatagctattttacaatagcatcttcagcggttctattggatctgtttttcgaaatggacgactattgtggtattcaaaagccattgtgaaattgtagtttgtccaaattttgattgattctctatatgccctctcttccaccaacgataagatcggtggggatgtgaaacaacatagagtgactatgattacgatgaatgtgatggaaaagaaggctctatctttttgtttactggttcttattttacttaatacaagtaaaatataacatgcccaaggttgcctttaatttgctagaaaaaaaaggtaagcctttcgttggaaaaaaaagggacgaataagattaaacgcaattcgaaagatgcatccgtagtagtttttttccccaattctctgtagcttcgaaataaatggacatacgtcactgttcagtgtcagctaataatgataacagtggtaagtagtgacatatcactgttcagtaacccctatgtgttagctaataatgataacaagtggtaagtagttgcagattcactaattttaattttatgaacagcgggttgatgacaacttcaccactcaccaccatcacttgttttttttttaacgagtatagatatgctcattttgtttgctaccaacatttgttcgagtgtttgggctttaatttgatttgcttaccaaattttcattgccaaccacatttacactgtcgaatgtcgatagatgacgtacaaacgtaaacgtgcacatcgtgcatacacgtccgtattgctgctgtcaggttcgtacaagggcaattgcataataactagccgtgatatacgtacatacggagtacatgcgtatacgtacgcatccgttacgggccgttgggttggtgtagacttgcatcacgttggcacagacgattgattcggtttggacatgcaaattatacttctctccatggacttcagttatacacgacgagagaagagaagatcagatgaccggatttttttacatttcgacccttttaaaaacttagtttacaaattgaacctaaaaagcttattccaggaataaaccattttcttctcggtgccggtgaccttggcgcccttggcacccaacaaggctagcaccgataccctcacccctctagaagccaagatgtagagggatcggatcaatcagcaccaaagagatggatgccgaaaaccttacatataaactaatttttttaagaaagggtcataatgtaaatatttttcttacaaatagatcctcagcaccatagaggctagcattgagggcctatttgtaatgaaaaaatatttacattttaaccctttttacccaaaaaatggatatattcctagaattagttctctaggggcctatttgtaaattatttttaaaaaagggttaaatgtaaaaaattctaggaagagaagaccagctagcattgctctgctctgctccaatcaacacgtcccaataattcagtagtataaaatactttgactttttaacacatggtacttatttcatgtcttgattgtatgtttagcttcaaccattgcactgcatgagaaatcatcctctggagcagaaactaccaaaagtattcgcaaagtatacctccataaataacagttcaccaaactgtactgattagacgtgtacataaatagatcatgcatagtctggaaaaaagtagataaaagtatggattcccgaaaccaaatagccgtatatagtaccagtaatagtaggattgcaacagcaaaatgggcaaccgtggagcttccttctgcttacctttgtgtatactgagattatctcatctttagtgaaactatctttctgactgcctacatcatgtaaagagacaatcaggtctgagaaataaaaacctcagaaggatagcactgggtatccatgggcagtactttgtagttcaaagcatgctctgcaacagatcaacaaatattaaacaaaccatattatgtacaactgcaataggatgagaaagaatagaagctgaccttaacaccttgccttccaaacctcagttatgtacaggttgaatacatctgatggcgtacaaaatagtgaacgctctccatggcacatccataaaccagagttttcaccataacatcacctagatgatatttcccctttcctttccccttgcatgatattgctactaggcattatccacctcctcaccttacatatcatcaaaagtgaaaggtgagattccatgagttgaaaacaaaatttcccttgaaaatagtgttaaagtcttacttggaagctgtaacacctcaaattcaaaattgatttctaattacatgacccactgactaaagcacatttggaggttttgaatttgaaagcttgtggaagaaggggtggcaaccactacagttagaaatactagaagttattgattcgtagcggagggaacaatagaatttcatcttcctttttctgaatccaggaggcaacaacagaattagttgcctgcttgccaaacacatttaggccctgtttaattcccaaaagctttttcccaaaaacatcacattgaatctttggacacatgcatggagtattaaataataataaattaaaaaactaattgcacagttagggggaaaatatcgagacgaatcttttgagcctaattagtccatgattagccataagtgctccagtaacccacatgtgctaatagcggattaattaggctcaaaagattcatctcgcggtttccaggcgagttatgaaattagttttttcattcgtgtccgaaaatcccttccgacatccggtcaaacgtccgatgtgacacccaaaaattttcttttcgtgcactaaacaggcccatactggcaatctgcatacacatgtcaccagtccaagaggcctcaagagtcaaggaatctcatctcactgtcttccctgaaaattcaagaagctgcaaaatatactattttacacaacagagaagagaagactcagcagtgctcccaatgacatcaacacgcaagtatggactctcctctcctatccaccaaacaactatcaaccagacccaccagtagtgaggtaatataaacagcagagtttcagcccatgatgtgatgcaaaaatatctgcaattaaactacaaaaatatatttgagatgccacacaatcatttggaaaataaacaacatgaaaatattatccagtagggaactcactactatttcagccagcaaagaagataaagcatcacgtggcaagaagcctcagcagcataaaataaatcaccgcacacacctgtggcttatcactgcagtactgcaaactgaggttccatgtttatttgcaactcaagctgaacaaaacaaatctaaacaatcttgacaaaagagaccacaaaactaactctgcaaaatttcaggcaatacactagattcctaattccttttaatcaaagcagcagcaacataaatggcacatcagctgaaatacactactacgcactgatgtactcccggtttcggtgcaattatgaaaatttggattatcataaaaatatgtattaactggaaaaacaaagttcttgagcaaaggcggatgaaatgggagatagatgaatacatcatgttatgcaacacctgatccagcacccaaaatagccaagaaaatatatagaacacaacaaacacaaaaccataatcaccattgtctaaaaaatactaagcagctgaattgatagattattagcctattagactccaatcggatggagtacaaagttcaccatagccaaagaaaagaaaataacagcaaagacattattgtcttctctgaactaatagtaaagccacatctatcaccctaaactaatcacaggattcataactcacaagagatcttttatgtcatattcctcttgtattgctctcttcgatatttccctctgcatgaagaacaatatataaatcatcaagtggaaataatgtagatactgaattgccaatttgataacacttagagtgctatcaaattgctttacaactagaaaattcaataccacataatttttctcacaattcatttttaaaaaacgtttactataatttggaaatcagtctggcacagattcagaattagcaaagctatctacagtctgttagacaactaacctttatctgtgtggtaatacttccagcaccctgatttaagttccttgctatggttaataaacaaagcagaatgccacaaaatatagaacttcagaaaccgataaacaaatagtgcatacctgaaattgttttacttcccaagatacatcggcccaggtttttgattctatgttctcccacaatataggagcttgaacagtctccacatgctggataagccttaagctacctgttgtacaatataatttggagacagaacattaacccatgctctacataataatatgttgtcccggtatggtcagttcgttgatatggaaaagactagccttacttgtaacaaaggcctcttcccaaagtttgtgtttggaccacgatggtgaaacctcccggaatgggattccaatatcatggcataccctggtccaagcaaatagaacttctgttacaaggcataaggatttgacattatctctagcatatgaaaccccagttagaaacccagcatagattgttcccaccgatgaattcatttaaacaagcaaatgcaattttctagtgcatgtcactgtacctagtatgctagttagtatgtaaattcatgaggtgaaggaaaggtaatccaaactatgtcattctagggaatctgcaaagagttgcacatcttcgcattaagataaagaaaaaatctaaacctagacatgagtccaagttggagctattttatcagtagcctgagtttttattcaccatctggttatttttatttagaagtacaaatcacagtacatagaactgaagaaagaagtggatacttactctatcactatctgacgcataataccagggagaattccatcacccagtggagctgtttgcacttcaaactcattagctgtcatttcaacagataaaggcttattcaatggatgctcctcctcctgaagaaacatgataaaaaaacaacaacatttatcagggaggcatccaaaacatagggtaattggaccaactggcatgaaaacaaataggtggaaagcacacctttcacttgtgcattataatcataccgattgccgatcgaattgctactgttattttagtttgaccttctactctattttatttctcggttgtttcggtaggcgatatccaatagcatgggactaataactttgtttgaattccaagaaaaccgaatcctagcatgaggctaaccctgcggcagacaacgaagaagttagtgatgctgccttcaagaatatggtctccatcgtttgtcaacaagagctccgtcaccccaggaggcctcatcttctccatgctcttcctcatcctgcatgacatacaccaatacacacacagtgatgcatcaaaatgacttagaatgctcgtaacgaagaggcaatgcaaaagggaaagaggagcagaggaaggcgacctggcccatggcgcgtacttggcggcagcggcgtcccttcccctcccagcgacggcaagcctcgccccggcctctccgaagaccggaggcacgtaggcccccaggtgcacgcacacctccagctccgactcctcctcggccggagaggccctgagcaacgccgtgagcgccatgtcctcgccgggcatctcgtcgagggcgacccgcacggagcggttgacgagaggctcgatccctctcagcgagtcctcgaacggcttgcgggacggcggcgcggcgaggccgaggagatgagggtggaagcgggcgaggaggcgggtggagtcggcgaggcggaggaggtggcgcggccaccagaggaggccaccggcggcggtggcgcgggcggtggtgtaggcgcccggggtggagtcgaggaaggaggccgcggagggtggtgcctgcggggagacggtgccgttggtcacgaggacggtggccggcggcggcggcggcggcatcgccggagttgcggttgagtttggacttggattggtaattccgttcttgcgagactgaggagacacatgtaggcttattgggcctcctccaatatataaggaataagtccacttgccgtccctcgtcgtcacatcgagtttaataaacatcccaagagcacaatatcagaaatcttcaccccccatctcgtcaaaccgttgtcagatcccatggtagtatgaatgagtggttttgttgatgtggcttcctagtcagaaaaaaaattagaaaacatgtggggtccacttgtaagtggcatacatcctcttcctctactcatatctcctcccaaacctcgctcaaacacagcgtgtgtcatggagcgcgatggccaaggtcatcgtccgctcgttcccgacccatggcccctggcagggaagcagaggggccgacatgcaaactgcatgggtcactgcctcggtgactcacgttcacgaagacagcaagaggatcaacgactccagcgccgccttgagctccatgagtgagtccgtctccacgttccccgtcgttgccacccacgaccgaggatgtagtggcaacggtcccctaagccctgatgccacacctgcctctccaactccatgacttggccgcctctcccgtccccttcacatatcatggtcgtgatttactctgccaactaatgacgccacgacctcggtcgagctcctcgactgatggacaaccttctgccccccaagccttgacgctgtatcaaccttctccaattccaagacctgtcctccctaacccccacaccacgacttcctctccactagccgacgacgcctagaccttggtcgggctttgtagctaaaggacagcctcatgccccccaagcctcgacgatgcatccaccttctctaaatccaatacctagagatccctttgtcagccatagtgcgactacctctccgtcaaccaatggcgccttgacctcgactggactccgggtttcttctccggttgaccgatgaccgctcatcatcgccattctacagagccagggatcacactgcctcaggctcgtcttctgcttgagccaacaccctttccacccagcaccactaagacatctcctctatcgacctcgcatacgtggttagggcaaaatatagaagaaagaagtggggcacgtacatgtggggccaacatattttttccttctcatgtacaagtgggccccatatatttttttaatttttttttctaactaggatgccacgtcaataaaactacccatccatactgccatgggacctagcttggacgattttgtcaagatgaagggtgaagatttctagtatttaggatgtcaattaaactcgacataaagataagggacggtaagtggacctattccccaagataaatataccaaaaaaaattagctagagttatttccctgaccggtggaccaacaattagttgttcactttatattttcatgtttctatcgagtttgaagagtgttcttgaactgtaataacagatataatgcatctctcaatttaaaattatggagtaaccgagatcccaggagtgtattgtgaatggtttcgattgatatgacgtattgactgcaatcaactcagcaagatacccctccaaatccgagcctgctttagtctagatcttaaaataaacagcttaaaattgttctgttttcttcttcggaaaaattgttctgattaaaccttcaaggtgacctaaacaaagtttaacaaatatatcaatctgataaaaccagagaagaggatgcagtctgaaacagaggtctgcatacattttcggcttatgaactcttatccatttttttaacttagatagaggtaaacacattggctccaatacttccttgctcttcaaccacattacacatatacttgagagactaatgctagcaatgaccccaacagtgagaatggtttacgggccataacccataacaatttttaaaacaaatgtgtcgacatacattatgtggggattaacacccacagattaacatcagcattgtcagccatacaaaatacgaagcaacgcgaacgacacatcaaacacaaatacatttaatctctaaaacagaacaggatgcatatataagattagaaatgacatgagtggatgcaaatactgttcaggcgatgaattgaagagctggtaagcaaggcacatgtataactttgattgcagtagtagtgtcacgcatagcggcgaagatggtttctgatcttggtcatcatctgaggtgttggcctggtagacgtcggaatggccaggaaatccctcaccatccttgctactatcggatatctgtgacagttctccttccaccacttgacaatgtcgaaattctcttgcttgattgggatggtcttttctcgcaggtaagcgtcgagttctgttatgctttcctgtgaactcctgtgatcatgctccatactcggttgaccaacagtttggaaagtactgttatgaatttgatggaagggatcgatatccattacattctcattgttatgattggtatgctcccttgcattgccctgattactatagtcctgaaagagctgaacgactgctgcttgaacctccgaaatgcgatctggaggtagggaagcattctccagaagtcattcaactttgacgagcttgaatcttgggtctagaataagcggtatgctttgtgacaaatatgtcttctcaaaaaccttatttagatactcttttaattttttaaaagaacatcgagcatcattagtttgttcttcatcaataccttcatcatcactatcatcaatttcttcttcgtcagtgtcttcatcatcattatcatccttccttctagatgcattggtacatttctttattttcagcttcactagctctataagggataggtttgaggttggagaactggagccagcaactgtttcgatagcattgtatatcatgcctaatgttgtgcggaacagctcgctagtaactgtttcctggaatgtgtcatctcctactaagccagcaatttctgctgtagaagaagagcattcattgtgaagaaattgtagtgcgtaatatgttggatagtatagaaagagagatatactgcgtaacgtggatcgattgtattgagcctcagggggccggtatatataggagtacatgaggaggagataaggaagtattacagataaggaaggaatccatacaaatcaatcctatcctaatacatctctaactaccatatactctaatatccccccgcagtccaagcgtgagcagcgcggacacttggactggagaagaaaccggcaagagtgctcaatacggatgatagccctttatgccattgtcgacgtagccaaagcgaaggagccgagagagccgtggtcgatgaagccgtgcgtagagtagccgtggtcgatgtagccgaagtcgggaagctgatgccgagtttgccgagccgcgggccacgcatggggcgccgtagagtggtcgtggacgcacgggagggcgtcgtggaccaaggtgcgcgaggatgcgctggagacgaagacggtgacataatcgcgacagtcgttgaggaagatgatgccgaagagccgatgtagtcgaaccgcgaaggacgagacgtcacacagggcttgccagaccccgggacaactcgggacaaacgcgcgcgccggtgttgccaataccgcgcgggcgagacaggggaccaccatgaatcatacgccaatgtcggaggagactagcagagaagacctccaagacggtcgcggcacgagaatggcgtagagggagaattgccggagcagcacgcggttgtcggagaaaggcgaagtgtagtcgaggaagatacgacgacgctggcgatgaatcatgttggacgaagacgaaggcgaagtagtgggaccaacggcctggatggcgacgtcggtagccatgtagaggtagctgcaccatcggcctagagtggcgacagtggcagcttggagatgcggcggcgatgctcaaagtagaggaagaagaccctgagcggctgacgatgaccagtacggacgacgaggttgtcaatgcgcgaatgacgatgaagacgacaaaagcggcgaagctgcggtcccgagaggacaacacagttgcagctccatgtcgatgcaacgacgagaagtccaccgatgatgtagccatgctgaggagggcgtctctcagcactgcaataaccagtggaggtgtggaccacgggcagcggcactgcggcccaaggggacgacgcaacggcaacccgaagcttgatggcgtagatgcgtagtcgaagacgattggcggcaaggtgttgtcgaagccaggcgcttgaatgggtgatcaagccgatgatgcgcgggcaagatgatgaagtggaagcagagtcgatgccgatgtcgaagacgcacagatgtcgacgaggcggtgggcgacgcaaacccgatcactgatcgggaaaaaaaatggatacatagcagcagtagcaagcaccatgtgtcgagaggctagagctctccatgcaggccttgaccaggtcaaccagcctgtgcacccatcttgtcgctcccatcttgtctctctcctcacttgctaaccacggcaagatcacagcaaaggaaacagtcaaaagaacgataggtaaggcagcaggagatcgacttgacgtagacgagcggatgggaacggtgtcggcatcgtggaggaagacggccggccgcgggcgtcctggaggaagtcggccggcggcggaagcggagatccaaggcgccgatccacgcggtcgcggcggtcgcgctggcctggtgggcgcaggcagcggtccaggcggaagaggagacgacggggacggccggacggggccccccgtaccctgctgcgtccaacgacggcgatgccagccatgcacgcggggatccgttggccacgctagtggcgcgccgtggcggagcggggaggacgaggtgctggccgcgacccaagaccggcggctgctgtagtgctgtgctgcttgacgacgacaatgacgaacgaccttggccgaagagattgatctctcttacgacaagcacgatgtcgagatcatctcccgggggcgacggcagcggaagcggtgagcggcggctctaggtcgtccgctctgataccatgttggatagtatagaaagagagatatactgcgtaacgtggatcgattgtattgagcctcagggggccggtatatataggagtacatgaggaggagataaggaaggattacagataaggaaggaatctatacaaatcaatcctatcctaatacatctctaactaccatatactctaacataatataacgcataccaatatctatcgtatgtccacgggtgattcagctttagacgtgaagaaatatctctgtgtttcttcttagtcaaacataattccataaaggcgaaaagccaatgacttccgtattctccacaaggaccatatattaggttatcagtggccatatcgagctctcaatgcatgtcggtagcatggaacaactttcgttggcttgcagagaggttcttaagatgatttttcttgtacaatttgtttctgactatgtccgtatagttttcattatctaatatagcgccaacaagcttaggaaaaagaccacaggaagaaatagttccctccactgtatcataaagtgtcttgttgtaaaggtaatctttgacgtccaatatgtaaccatagggagttttgaattcatcagagaacataccgttgtccttaaacacccgtattactctcctacagagattccattcatcatcaatgaagtgggccgctaggtacacagtatccaccatggcagttcgagctcggcctattgacaaacttaccagcccagacgtacgtgcaatagcatccttcaggctgctcgtttcttggtcgaagagcgcatcacacctctcctccacatcatctcgcgaaggcatcttaaaatcagggcagagcattccaacaaatcttatgaactgcttgtcttcgaccatcgaggaagggaacccgtgcagtgcgatcatcctgataaaatgatcttcagcagcagcagcagcagcagcagtctccattttctgaccgtcagaggtggatttggatatcatcgatgcattattctgcaagacgtgattcccttgtcgctcagacgacgcaacgggcgagccgtgcccgttctgtctaccacgcccagacttgttaggatgcctcaccgggcaagtctcctcgtagtgcttcttgaggcacgaggtgccatccctagctggatctacacacagcagcgccttgcagtagttgcaccctgccttctgctcaaagtgatcccaaacctctgaacgcttgcaacgacctgctctccttgctggttgacagttgttctcctcctccatctctctatctgttgatctattcactgcaagaaaaattgtgcatcctaaggaacgggggagctgcagtcctaccgatcataaattcataagctccattcgaaaagagttcaggaaattttttagataatgaaatagaataaaaatataaaaccattccagcctttgctccaagggctacaaccaattattacaatgaaacactcaacacgcgtgcagaccaaagaaacttaaagagtttaggaaatacacatgatttggtactgaacgatatgatacatggagattggagaacaaactcgaatggtgaacacacaacagatatgctgtcatatgcgcaccgcagacgaagcaacgcagagagcgggaaccaaattaggatcagggctaggataacttacgtcttacgaagctagtagttgttgatggtggatgcgctgatatcgatccaaagctgagctcgcagagaccgtatttctactcgatctgcttgtgtgctggctttcaactagatctgctttgctccaattcaagaaagaagaagagaaaaacttggagaaccggattccctatgaagcctggttcggcaagaagccggcgatgggacatctgcgcacattcgtctgcctggcgtacgtcaagaacgtgcgcccacacctctccaagcttgaagatcgcagcacgcccatggtgttcatagggtatgcagcgggcaccaaggcgtacaaggtgttcgaccctgtgaccaggcgcatgcaggtgtcacgcgatgtcatcttcgacgaaggcgcgagctgggactggggcgctaaagtgaccgagtctggccttgaacagacggagttttccgtcgagtatgtgctgacacaggtgagcggtggtggtcgcggcgctcaggaggaaaactcatcgtcaagctcacgacgcgctgcatcgaccatgcctgaggagccgcgcacgccatcgccaagctcgggaccacgagcgtctttgcatgggacaagtccagtgttcgtttcgcctccgtcggggggagacgagcaccttgatgctgatcacgatgactgccccgccaaggtattgtcccctaggggatctcttgggcgacgtggcgacaccgggcctcgccgagcgtgcactcgctccagaacaattgtatcttcaggaggctgaggaaccagcttcgtttaacgaggccgaacaacaccagcgctggcgtagcgccatgttggaggagattgcagccattgaagaaaacaagacgtggcgactggccgacctccctcgtggacaccatgccattggactaaagtgggtcttcaaggtgaaaaaggatgcccgaggtgaggtgaccaagttcaaggcgcgtttggtggcgaaaggatatgtgcagcagcccggggtggacttcgacgaggtgttcgctccggtggcaaggctggaatcagtccgcatgctgctcgctttagctacacaggccaggtggtctgtccatcacatggacgtgaagtccgcttttctcaatggggagctcactgaggaggtgtatgtcgtgcaaccgcctggcttcgtggtcgagggacatgaacatcaagtgctgaagctggacaaggcactctatggacttctccaagcaccccgagcgtggaatgccaagctggacgcaagcaaatgtcacttggttttaggcgctgtgactttgagcacgccgtgtatgctcgaggtgagggaacacaccgcttgcttgttggtgtttatgtggatgatcttatcattacaggaagtgatgctgtggagattgatcgattcaaggcggagatgaagtcccttttcaggatgagcgatcttggtctcctctgcttctacctggggattgaggtcgaacaggtggcgggcagcacacggatgactcagtcggccttcgcgcgtcgtattttggagaaggcagggatgcaggactgcaatgcctgtgcgacgccaatggagcagcggctcaagctcagcaatcacagtgatgcaccaccagtggattctactggctatcgcagcatcgtcggaagtttgcggtacttggttcacacaagatcggacatcgcgttcgcggtgggttatgtcagtcgcttcatggaggcacccactgccgagcatgaggcagcggtgaagcggatactgagatacattgctggcacaattgattacgggatcatctaccagagatcggagacgccggctactctagttgggttttttgatgcagatatggccggtgacgtggatacgcgcaaaagcacgagcggtgtcatgttcttccttggatccaatccggtgagttggcaatcccagaagcaaaaggttgtcgctctttcatcttgcgaggcagagtatattgcggcgaggacagcagcatgtcagggcgtctggatggcgcagttgctgggagaaattaaccaagctcagccagatgttttcaagttgatggttgacaacaagtcggcgattgcattgagcaaaaatccggtgtttcatgactgcagcaaacacatagctactcggtatcattatatccgggagtgtgtggaagaagggcgagttcagttggaattcactgggactgcagatcaagtcgctgatatactgacgaagtcccttggtcgagtgcggtttgaggagctacgctcgcggatcggggtttcggaagtaagtcgcgggcacaaggtttagggggagatttgttgcatattacgttaaccttgtgcctgcaaaagctgttttatttagttaggatagtttcctttcatgcacgttatgtgtttgttttttattccctgtttttctgggctcgctctagtcagagttgagcgcgtctataggcctgaggcgtgcgagttcacgtcgaggcggtaatgtgagagtctctcgctgcacgatctgacgagtgggatggcgctcgtaatccggatggtggagcgagtaatccggccaatttgttaggccgtagtgtgcattttcccttcaataaaaggaagaagaaaacatgaaaacggtgcggcaagatttaagcaccacaaaactttctatgttcattgctctttagcttactgttcatcttcaagtttttgtcaagtgagagagagatatcgatcctgtgtgtttctaccaacaggacgcatctcctggaagcttttcatccttattgagaaatgtagtggggcttgccttgctcgaggagagcgtggacggtggtcgggactcggtccaaacgccccccctttcaccctgctcctatcactgcttgctacggcagtgtcgctatgctcaatcccaacaaaagcaggcactactttgctttttgactcatccaacggacctctacttattggacacgcagctccctagcttgtctcttctgctgactagtaggcgcccaatccaatgccggtcgacaggatgatcgtgtctgagagcacccacaatggtaaagtaaggtgctatctataaaacatgtacatctcagcaatagactagattaatagtaaaccacttcaatggtatgtctacatgggtatctatagctctctaatccattgcctcgtttttctctatagactatctccaggttagtagatagctttcctctctctcttcatttaatctcttccaagtaggaaaatatgctgacatggatctcttgtagagagcctatagataaccattgcgggtgccctgagcttctcgatccttccgcgccaatcaatgatgctggtcagatgcatgtggatggaacatgctcatgctcatcctccagatgtgcaacatatttattggttttcagtgtttccagattatttcagtacatatatatattacttgatgatgagaatggcgtgctcatgttcctatatatatgctcatgcttttctactggtgctgatatggtgtaaacatgatatattcaagcgctacagttttcttaaaagctttttgaaaattcagattatcacatcatcttgtttatcaaaaattcagattattgcatcatcttggactgatggcatatattaatgtggactgatggtcaactcagcatcgcattgaagcagaattagtataatgcacaatgctttacctgtctctatttatctacgctttgaagctttaatttatgctaaattaggattggttactatggatttcgttgcttaatttgtccactgcaaatgttactccacgaccagctcaccggtcgccggacactagtggatccagtgtgactgattccgctgatcctcccattcgccagccggcactgctttggggaactcttgctcattaggcgcctgttgtgatcaatcctgccaccgaactgaagccgaccatcccactgcctttgatcgattgcctgaacggatccccaaggtggcactaacgcctcctctgccgtttcagaatctatcagagcggccctcgcaggttcatctctttttactgtcacagtttcatactccatggttccaacaaacccttatttcaaacaacatattatcagtgaccctatattcttgcttagaggagtacatacatctatgattagtggcatgcatatgtgatcagtttccttggttcaaatccattgtgttcttgatcatggtcaattatgttaaggagctttgatctgtcagtacccgaggcatggcatccattcaattacaaatggagcgtgaaaatagcatttttcgaggtcatgtgactaatgcccttgaacaaagaactttaaaatagaaagggagaaaataactgattcaatttaattatatgattcgttgcaggctgttgatgttttgtaagtcacagttgggaagaaaatttgaacttgtgatggctgaaggaacacgaaaactttgggttgcattcctatgtgaacaggtaatgtgttgaattgcttaatttttttctccaaatgacttattaatttgcagtggtacaccatggcatatactccttttttctatgtaagcacgggatttttggttggttctattaaattttctttggttggatgtaaggtgtagttttcaggtcattggaggctctaaatatgcttgtaatccatgtgatttcctcttatcacattgaaggcatctcctactgctgatatttgtcggtccccaaataatactcatatttgcatttttctttccttgaattattcaatgtcttagagtacatgaccttgcaatgccacttccttattgcagcgcattattcagtttgcgttatgaataaaaaagtggttatagtagaccgaaatagtttggaagaacagggagcctaaagatcctctcagttggtgtctgtgtttggccagcttgaaaccatcttaacattgaaggttcaggaaattgaacaaaggtaaaaggccagatgctgatgtttgctgtagatgacatggatacctgaatcagtccaaagttgcttaggttggagctacttcttgataggaatccaaatatcagaggaaaggttgtccttgtacaaattgtcaatctagcaagaagtacagtggaccacggaggaagcaataaaagaagtggattacaaagtgtcgtccttatttatgtccttatttaccatcatatattgttttaatgaaaatattgcattttattatgcatctgactgttattgtaaatatcatgaatttcatactatatgagtgcattgtttgccgacagaaaaatgatgagttggataattccagaggcattgacacaaactgccatcagccaagcccactaattatgtttgagtttttgagttgctccccatcttttagtgattatttcatactccgtggatgatgatgttttacaccgtgcaacagagttgactgaatctgagataatgttacggaataaaaagcactaccattatgttagatctcatctcacaatgctccttaatgggatgtgtatagctttgctcaagatctagaaagggaatgcaaatatcactccttatatataactctctttatcatttctttcttaagtgaattataaattatcatctttttggtgttttatttgcattaacaagcttcgccgtaacgttagtacgggcatactactagttcacctatattgctctaatcgataatctctacatgggaatattccaaggattgcaatggatcaatgttcaacagaaagcatctataataaatgactaatttaaatgaataacgcgtaattaagtgtagcatgactattaacttcatgaataaataaagcacaatataactggatctacaatagctgctcaacattatcaaaggaattatcgtggcttgcctttcccattacggtggaagccgcagtcgtagcctagtgggtacggtctggctcctggggtttcagcggctccttggtcatgatctagcacacacacaaagtgactcaaataagcctacaagaaaataatgaaaataatcctcgttggcatccataatatctataaattataacccactatatcctaaaacttgacatgcaaagatactacatcatcatccattagcaattattatatcttaatcatcatacaaaatttgctatatcatctatattttattgtattataaagcttaaaaatataagcatgctacatcatcatcccacataatttacataatattttaacatatatctctccatcattttctacaatatcctatatacttcatcccacttagttaaagttttccatcttgtctcattaaactgcattacctcaaatattaatttctagcctttagatggttaatttacagttcaaatcacgctctacaatatgccatcgactttttcttaacttgtacgatttaccaccgccgtccggttagtctccgttacaatatgccatcgactttttcttaacttgtacgatttaccaccgccgtccggttagtctccgttagtactatacaaatttatcgaaatgaccaaaatacccctaggacaaaaacttcaaaatttggataaaaattctgaaatatcatattttggaagtttttgtcctaggggtattttggttggatgtttacaatcttatgtttataataggaaaaagtacgaattacccccctgaactatcgtcgtcggccgaattttccccctaaacccaaaaaccagacatcactcacccctaaatttttaatactggacgaattacccacctcgacccaattcggagcagttttgtcctacgtggcgcacacgtggcaacctagtcagcatttcttttttttaaacacggtggggcctacttgtcattgtctctcacctccttttcctcttcccctcctacccctctctctctctctctcgtgtcgtcaggcgagcggtgggcggtggctcgtcgtcaagagcggccgcgcggccggtcggcgcgcacggcggcgggcgagcgtgggcggcgggcgcgcgagggcgggcggtgggtggtgggcgcgcgagggtggacgacgcgcgagactatgaggtgggcggccgcggacagtggcgcgcaagactgggaggtgggcggccgtggacggcggcgcgcgagcacgggcggtgggcggcgggcgcgcgaggtcgagcgacgagtgcggttggttggctccggtcaacaacgggcgcggtggggcaagcggcggcgggcgcggttccggtcggcggtgggcgcagcagggagggccaactggtcggcggcgagcgacgagcggtgacgggcgcggatgggtgcttcctgtcggctacgggcgcggctggccgagcgacggcctgcgcgtctccggccgacggcgggcacaacactggttggcagcgagtggcaacgggtgtggctgggtggccctggtcggcggcgggtggcgctctaggcggcggcggggagggaccgccaccgtcacttatgccgccgccaccaccgtcgtcgccgctttccctgtctgccctgcccctcgacggctccgccgctgccgccgccggacctagagaaagggaaggaaatgggaggagcggctacagcgaggagttggcgtcgccgccagtgactcgccacccagccgcgcccgccgccgccgctcgcgccgcagcccacctcccgcccctgcacgccccgtgagagagagagtgaagagggaaggagaggagcggctgcggcgaggagatggcgttgccacgcccgccactcgcgtaccgaccgctcatcgcccgccctcgcgcgcccgctgccgtcgccgccgctcgcgtgccgaccgcccaccgccgcctcgtgcgcccgccgcccgcgctcgcccgccaccgtgcgcgccaaccggccgcgcgaccgctcctgacgacgagccaccgcccaccgctcgcctggcgacacgagagagagagagaggggggtaggaggggaagaggaaaaggaggtgagagacaatgacaaggccccaccatgtttaaaaaaaaaagaaatactgactaggttgccacgtgtacgccacgtaggacaaaactgctccggattgggttgaggggggtaattcgtccggtattaaaagttgagggtgagtgatgtctggtttttgggttaggggggaaattcggccgacggcgatagtccacgggggtaattagtaattttttcctttataatatgatattttgaatttttatccaaatttcaaaagtttttgtcccaggggtattttggtcattttgaaaaaaattgtacagtgctaacggagactaatcggacggcggtggtaaatcgtagaagttaagcaaaagtcaatggcatattgtagagcgtgataaagtcagtggcaaatcgtagacgtgtgacaaagtcagtggcatataatggattatctctttggattatcaatctatatgctatttaaattgtcataatccacatcaacttaagtggtttataacctttttcaatgatcaatccaaaatacaaattatataagcttgcatcgtctagctatattacacattatttctattataatcacagagagggtcgctaattaatggtcgcatacgtgtggagtcctggctggtataaccgactcatcgaagctacgtgtacaattaaacgggaagcccacgcgtaaatattaattggggtttaaagagcccacctaggatattaatctatacttaggataatatgatacatctaatcaatggcaagatctttctagttaacatgagagctctaaaaaagtgcccaattagtataggtatagatagatagatagatttggagaaaaaagtagatgagttctagttgaagctagtatgtatttgcatgtgaaaggatctgactagtaagatgtgcacctaaaacaaaagttattcttgcatagattgcaagatgaatctgtgatcgatcatctctccactttgaaggaaattattgttgatcttgaacctctagaggtgaagtatgatgaagaggatttaggcattattctattgtgttctttgcctacctcgtatgcaaatttcgaagatactatccttttatagccctgatattgtatctttgcaagaagtttacgatgctttgaatctaaggaaaagatgaaaaatatggttccttctgaagattgatgttcacaagcagaaagcttggttgtttagggaaagtacagaggtatttattagtcttgtcaatagtacaagaaaattggaaatgatatctccaaacgttgagagctgtataagaaataagaatgagactggtttcttatgattattctgcacaatctagtgttaagtggattcttcatactacttgcacctatcatatgtgcctgaatatgaattggtttgctacctaagaagtagaatgtgatactatgtttaggggtgaaaatggagctgattcagatcgatagtgctcataccatatcataaaccagatttttaagcagatttagagtgtgcgcgaatagtgtgcagattgttttggatgtcaggtgctgactcggtttggaaatgatttaaaattatcggatgttatgtgcatatacaatcatacaacatctagttagcaatacaacggataacaataaaataatcaattaatgatccattgtaataactatatgcttaagtgcaaaataacatgaatacaagatatccataacataaaagcacaactaaattgattaaatttatcgaatattacatgtatatacaatcaacataacgtcaagttagcatacgacggacaacaatacaataatcaatgaacgatccattgtaataactatatgctttagtgctaaataacatcaatatataatatctacaacataaaaagcagttatacattgtgagatgaggcggtgagaaccttggagtaagtagtttagattaattgatgaattaggtcattggatgagcagctcatgttgtatgcaacagtagagtggttacataggcaatttttgattattcgataaaaggcttatcatataatccgcatctgctagattttagagataccattttcgcatccggatccgcactaaactatccgcatccatattcgccaaatttctataaacccataccgtaccatatgctcgttttggacagatttggagcagatttgattagatatattattcgatttgttttcacccctaactatattgattggtgataatatacccctaaggttgttggaattggtgcaagtacaatttggatcaagatgtttgatggttgtgtaacaacatcgtttgatgtgttactacaactttaaagagaaatcccatctgattgtgtactattgattataaaagatacaaatatttaagtagcaagttaaccgaaggctttcttcttatgataaaaagccaatattaaaattggcggcttgtaccatctacaggttactacaataccggctgatataatgacaaagctaattcttgatattaagtttgagcttcactcaagcttggttgatgtcacaatttaattctagttactatttagcacatggtgattttatctatgtaaggttcttctgtgattgatatttctatgctaaagagaaattcatctcaacatggagatcgttagatatgtgatttgaattttttcatgcaatatatccagattagtagaacttttagtctttactccctctgtcccataaaaaaccaacctagtaccggatgtgacacatcctaatacaacgaatctagatattgacatacctctgtctagattcgctgtactagaatatgtcacatccaatactagattcatcttttttggaacggagggaatacctattaggtcttctagttttcctccctttgtatatctcgtgcaaaccatatgggaggggtgtgacggaccgatgttagtccctatgtttgtaaccaactcctcaatagtgacaatggcaaatcaactttacataaatatttttttatcaccgctatgtatctattttctttttttcgcaaatgcgtgtatctattttcttaacaggttcagaaaatcttagaacgggatggtccataaatggagtggatacaaataacacaaaacaaattagaacacaaatatagcaaaaccgtaaaactaaattgttttaattatacaactaaataacatcaaaagctgggatgatgtactaattagttcttccttctcccactattaaaaataggccaatattatactctgtgcgtctacaaatattgtaatgaattttagaggaagcaccgacgggtacagtgtggagtgtgtgtctccacccacaaagatttaaatgttggtttctacaaatattatgtacacacgagtgcatttccaatagaaatttaagtggggctagaaatatgccactggacttcattttgaaacgtgtgtgagggggcgtactcacaaccgtgtgagtgtagtgtacgtgcgacatgatgtgctgatgtccgtctctttgagtgtttgttaaggtccgtgcgagcatgatcatacgtgtacgtgtacatttttgtgtaatctatcgaaacgaacaaatataagcaattttggctatttacctcattacctgaatatgtgcttgtgcaaaattatgttgttacgttcattatggtttagaaggcttcaaagcccatgagcctggcccgctctttgcatcctaatggttgttacattatgatttagagatcacttgcactgcggctgaggctatatgaaccagcccaaagcgaagatgatgagagagtgaaggggattagagacgattaccaaaacatgttgaaatttgagagaacgatacagtgtgaatcagaaaccaaaagaaaattgagagtatgatccgacaatacaagaaaatttttcaatcgtaccatacgaaattacacacaaagacgaagtaatgtggagcttaacttccacgatgaataacacatgaacgaaaactaaactaaaggcaaagacaatctcagcggccgcagaaatctctaaagttaacatgattttggtggcggtgaagtaatgagggtttttggttaaaaatttgctgcaatagattccctaatctcgtttccaaaattctctgttccctactcgggattgttgttatctttttctaggggacacacggttgatagcatcctaaaattttattcccaaattttttattatgtgaatctaaatagaatttaatgtgttaaaatttttctctcactaaagagattgggtcaaattggtttcctaaaaactaaaatggtgggccacaataaaattttcaccggaaaaatctgttttgcactcttccctaccgcgagatcgtgtgcatgcatgtcaccagatcgcttcctgcgcgcgaagagctgggtagtgccacgattaggagccaaagtacgtctctagaaaaagaaaacgataatctcgaagtagggagcacaagattttaaaaataagattagggaatatctattgaaacaaatttttaactaaaaaacctcatatagtcggattactggatagggaatgatgtaaagattatgttggtgatgctcacggtaaatcaaagcggggacagcccctacaaactcggcggcagccatggtgaaaatcggagcacaaccgctgcagtctgcaggggaaacatcggcaaaaagatgtgcagcttgggaaagtcgtttgcaatcgagagaaggaagggaagcaaagaggaggggtgctatgctgctaccagagaaatcctcgccagccatgaatttcatcacggttagcaaggctggctgctggatggcacagcgcgagaaacagcacaaaattggcctccctcctcacaaaaacgatagagaaatccaaaaaaatcgtagatggatgcaaggtactatggaacgatatcattgtactgcttccggtttttcagatggaaaacacacacatataaaaagctaacaaagtacttttaggatttaggacttgaggctacctcgtgcagttgtagcgttcggaggagttgccaaattatcatctgtccactcggctgaaagagaactgcccatattcgtgaagtgaaaatgtggggggagcgatgggttcggaatgcacaaccttatggcgtcctagaataggttgcgtttttcatatatgatctcctcttatagataagatcgacgagttttcttaaagcccttttcctcgattagatatatctcccatccctgactattaatttggcattcaattaatagacctctctgtaagtggaaatgtaattggtaagaaaaaggtttagtgactattttggtggtatacaagaaatgaggggatgtcctctcgacggatgaaaattcatcttcatggtaaagatatacttccttcgtcctaaaatataagcattttatgatcttaacacggtctccggtatactattttgaccaacaatatgtataaaactaagatgttttaaataaaaagagttatatattatgatagtttattgagtgataaatctaataacatcaattttagatgattgatctttttaatttttttttgttttcaatggtcaaagttaaaaatgtttgacttgtcattatactaaaaatacttatattttgggacggaagaagtattagtgaagtttcaaataaaatattttttatacttgtgaagatctataattagattgaaataactagcctactgccgctagtagtcgaatgtactgtatcagtgccctcaaactactcactccattccatgtttgtataatactagtagtaagttattttcggtttatcttaggtctcaacttcttcgagtcggaccaatttatagaaaaagatagaaacattttgaaaaaaataaatggtagctagatttaatgagactaatttagcgtatttcagatgttttatatattttctagaaatgacaacccttacaatattgaatggatggagtatctagcaacgtctgacagagtgacagtctaaaatcagccaaaatcaagattactgttggcatactctatacggtagctcggttgataatagccacttgcattaattacagaaatgagaacgtacgcattttcaccaaacacggtggacacaactaacactgtcctactacataggcgatatgatagagtgaagaaggggacaatttgagttatgtcatgtataaccatggtcaactttgcatacatcactggttattgaataatataccctttttatatataacaaggaaggtggcccacacgatgcgcgggcatccatactattataatgtaatattataatttctttagaaagtatatcttataagggaaactataggttggacatatctgaaaaccattcattgacttacaagatagatcaaggtcatatgacatttgaatttacttttggactgagtgagtaaatatcatttatacgtgttcacgaaaagtaaatatcatgtataccatttgaacacataccatacaatattgctacaagtaaaaattgtgatagcaaggactcaaagttattgtgatcgaatcgtctcatgaagatgcatgatttagtgacaaccgaattaaggatagattaacagttggattgtttttcccttcataaaagttcaaaattttcatattcttttccaaagttttaaagaatttttgttaggacacaaatcatttgcaaaattgcttggttgggtaatgcaaaatagcagcaattgtttgaagcttttcttttttttttctttttttttgcatgtttgattgttttcttcgaaacaatatttgtttgaaataagagcaaaattatataatttaattggtatgtatagtgtttatcggataaccttggcaaatcaccttagctgtcttaggtatgatgcttcgtcatacgtgcagaaggcaaacatgcacatgtacgagctctttagaagtttcattttacttttataaaagatagatatgtcatgcttgttaataagtccttaataggtctagttaatagctccataagtttaagtgaaaaccgatatcaaaatatttttattgaaaatagtataaaatagtgggttcagtaattaatgtaaaatattagttaatatagatcataaattggcaatttactggtagagaatattattgcgtaacatttatattaaacaaaggtgtttttaaaattttgatataaaataatgatttgatataatagatacatcggtttaagtaaaaaaatatattatattgttaatataaagggtaaaataatatagttttataaaatttattttcaaacatttgtggagctgatttagacatatatatgatgatatatataatctatgtttataaagttataatttcttcaaatttattacgactactaataattacaatttcgtctatacaatgtagaagagaaggaagaagaaggaagcaaatgtacgtttttaatgacataatttatgtttttatgttttttcactttatctttttaaatgtacgttacagttgtatatgtattttcggtttttttacaaatcgtacgtacgtacctttctctcgtcggtgcgctaagggagattaggagagagattatcaataggatttaatctaatggtcagagataacggatccatcaatttaaataaaaatttatggctcgatattttaccttttttctcacattttctagatttttttctaatttattagaatgtatttttacaacttaaaatatagttaatacaaatattgattttctatctcatctaacctagaagggaaaaaaaggaaagaacaaagagggtaggtacatatgtacgtgcacgtccatggagagatagaggactttttctacgcgtgattctttttccagatgagcgtaatttcaaaatcttaagatagatctatgctataaaataagtggttcaccaatttaaataaaaatcgaaggtcggaatttctagaatctcctattataattacataattttcatacgaagatgaatgatcaaatatacactcactcaaacaatgtcaatagcataaaaaagcagggttttaaatctcccgctataattgtttgaaaagggttttagctatttgctctcatgtacaatttaaccgctatagctctatttagtccgctatatctgtttgagaagctaaccgctaaatgttttagcccgctatttaaaacatcctaaaaaagtagaggttgtagggtaaaaaaaggggtaaatggggagagtgaaagaaaggagggcacataccttacttgggtacaaacaggatgaagcaggtgtacgcacatgcgggtgagatgaaggggagggaataactcttcttttaatctaatctaaatctaaaataatgggacccaccaatttatatctcacatagtaaaaatatttttattcggtgaataatggagtaagtacgtacatcctccgtttcacaatgtaagtcattctagcacttctcacattcatattgatgtgaatgaatctagataaatatatatgtctagattcattcacatcaatataaatatggaaaatgctagaatgacttacattgtgaaacggagggagtacacaggatgattctttttggcttttttaggtgaatagtgctatatatttgtcgacatttgttgtcgcaattctggtatttgcatagtatggggatcgtcggtgctaggatatacacgagactgaagtaaaagagacggagacagggatttttatacaggttcgggcccctgaattgtcaggtaataaccctacatcctgttggccggagccggagttgcttttattcaccataatcacaccagtacaatatgtggggtagcctatctaactattgtcgacatgtcggtctgaaggcctgactcgtagtcgacaatagggtagccttgctcctcgaatccgtgtccgacgagatcagagatagcgctttcgtctctcctgacggtatctggagacatcgtaggggaatagccatgcctatccctgaagtcgatatccggcggcgtgtcttggcatatgttggcttgtatgttgtcccgtgtattgtggtggttgttgattgaggtgggtctcgatcgtggtgaccgtgttgatcgtgttgatcgtgtcgatcgtctatcgattgtcttgtctcatggtgggtgtccccctgtcctcttaggggggcttgtatttatacccataggtatccccttgtccaagtagaactagggaaaccaatatggatacaatccgagtagtccttgtcgtttctatttagaactctggttgtctttccttattcggaactccctccatatctaaagtcagtttccgtataggacatggtatgtggttggtcctgccgagatgtagtcaactactattaggtatgtggtatccataaccctgacagtagcccccgacttcaatgcaaatgaacgaattcatattctcgaccgctgaccatggagtaactgttatcgagctcacgtgaccgttctcggtgagtttagagataacgttagacttcctttatcagcctcgtgcgggcaccgaaagggtttgtctaagtcaatctctgatgtcgaccaagaaagtacagagtgtacgactaagtctcccgtcttgctgtaatcgagaatttggattgaagtcaagaaattgtatctcggcgagtacaccatctcttcattccgtattccttgtcgagatccagcaaccgttctcaagcgatcgagaaggtgtagagtctgcgacgaagccttgtcaacattggtcgtactcgccttagtcgatcttggagtagaaccatagagacatggagtcttccgcaatgtcgaatagaattttcctgaaatcaatgctcagaaaagaatatcaaatagaaatagcccccgagcgaacgctcaaagggtgacaatgttataatatgtatggtaaattgaaaatgaattaaatttaccgaccaatgttctgtgtatgagcgtcttctctcttaatgacttcgatcggtcagtttgtagagttatacactctccctagcccccagccttgtcgtcggagaatcgttctcagaggataaggctcttggacccttgacctgccttggttgaataagcactgatcctagcccccagccgtgaagttggaaaactcaatttccgattacacggcttgtttaatacatacggcgagaactcttacatgaccagatcttacatggtctttcgtctctacaggatccgacaaggccttatcggctctgggcgtccccagccgaagatcccttaggttactcggaggccttgtcaagacggcgtaaagggacagtaggataggtttcgatgctaggtgtcgtcgtggtaagggatctctgggtaaaacacttggcgatattgtgtacctgctatcaactttattgaaatagaggtagtaggagagtcgctacatcgctggtcgaggaccaggcagtagtcgtaactcggccactagaagcaaatgtacgagagatcactacgattagctggttgagaaccggtgagtaggtgtctctcgatcatttgtcgtcgtggtacgaggaccgctacactgccggtcgaagaccagtcgtagctgttcctcaaccatctaaagtcatggtgcgaggaccgctatgctgccgtagtcgtacctcgaccatctgaagttaaggtgcgagagattgctacgtactggtgtgagaaccagtgagcgagcagaattatctctcgaacaccaatggaagctgcggtgtgagagattgctacatactggtgcgagaaccagtgagcgagcagaattatctctcgaacaccaatggaagctgcggtgtgagagattgctacgtactggtgcgagaaccagtgagcgagcagaattatctctcgaacaccaatggaaatgctagagttggtttattgcaagtgtatctcatgtggccagcatgactcacgtacccaacttatagcatatccggatgtccgttcacaatcatgttgggtgatcaagccgacaacgttcgcgaagaattgtccgttaacaaccttttctcgagtagtccagccatggccggtgctatgagataggttgtcggtctttgttggtaggttgggtgcgataactctgcatttgtcgagaatgttctcgataatggagtgtactcgaccataacctactcgagtgctcaattgttcctgaaaaatattttctagaaggcaagatatataacagatattattaagtatgtacttaaaaaaactacatggatcttctagtattatcagggtataacgagtagattaaatatcaggcattatgtaaaccgtaaataagcatgatctatacagaagaagatagagcgagcccccagcgttagaccgtagttggcttatcgtcggaagtactcgcacaacggatattgtataagaaacatgctctaggtaaacataataaattatagatctgacaatgctgtatcatctgaataggtatgataaattgcatataaaatattgcgtacttttgtagatacatgccggatgtatctacgaaattagtagatcaatttgaaaaaccaatctaccaattaccttattgcgtactcgtttgacatgatctgacatcttttggtacgccgcgtatcttgaggcttgggtgaactcgatagaccaagttgtcgatgacgatgatggttccgatctcgtcggaagacatgttccggtcgggttagatctccacagccgaagtcgtcgagtagcttgttgttggagaatccatctcttaaacccatctcgtcgaaaccctgaagcaccaaaattcccctacctggcgcgccactgtcgacgggtgatacccgtagaccggatatagagggtattggggtacgttggtacaaggatctacgtaatacgacatcaagcaaacagaagacgaggattatactggttcaggccccttggtaggtaatagccctaatccagttgatatgggattatatgatgaaaaccacaggttacaaagggaacgatggaactcgatgaagaaccggcgagatcgtaatcgagttggttcgactagatcctccgttgacttggctcctgcaggctccagcttcgtaggctgtggtagttgtgttggctatgagattcgatgccttaggtcctcccagggggtcccttttatatcgcaggtcaagtggtttccaagtcgaactcggagacatcggaccctacacaacacattgacgaccctgtcttgtccgagtaggactcttatcctctgcaaactttgtggaggatttccttagcaatgcagataatgtccatgtatgcgcgggtatgccatgtcaatatgtgatgcatatcgaagggtaaagggtatacctaacccgtaatcctgacaatattatttatacgtacataggatattctttttggtttggaaggtattattttttttaatagatctaatctaatgtataaaataacttgtccatctgatttaacgtgaaaatcgaggatcgaatgttttattttattctcaaatgttttatactaagatgaatataaatatatgctcaaaaatatcaatggcatacaaatgaggtgatataaatatattgtaaggtatttcagataaaattaaataaaaaagtttggggggagtaaaaaaaaggtggggcacgttcacgtatgttacatgcttgccattgggaggggggcgtacgtactcgctcgtgcgacaaggggaggactaattaactttttttaaatctaagctaatctaatggtctaaaataatggacccagctatttaagtgaaaatcaagtgctagatatttctaatatattaaaatgccacgtggtgatctaggagcgtttttaggagttccacgtggagacttgagagcgtttgtagaaagtttaatggacttttagtatataatagatagatagatagatagatagatagatagatagatagatagatagatagatagatagaagatagatagatagatagatggagactaatacctattttttactcccgttggattttcctagctatttatgtcctccactacttcatgtatgtttaatttcattgactttttcctattcctttgttccgtagtccttgatataatgatatttgttccaaaaagctgtgtacgtacaaaatatgtccaagtgactcaatacaagtaagactgctaaaaactcatttgtttcactactagaaaaacggtttttttatagcgttacccttttatttttgctggaagattaaaaaacaatacactagtaaaaatatatttggagggattccagtaaaaaaccgccagcgaaaatcgattttcgcaggctgttacttaagggtccgccagaaaaaatagagttacttttgctagcggacctcttaagtgagaagctagtgaaaatctatttttgctggtggcacctaaagagcaccatcagtttaaaaatatacgacattaaatagcagagtaagtcatgcacgtgtcagttgcctagtctcattcccaagtcttcccttcctctcctcttcccattcttagcggtggcggtgaagcggagggcggcggtgaaggggagggccgcctccaccctcaaaccctacttgaggaggcactactagaaaaatgatttttcatggcattggcctaatattttctctggcggtaaaatgtgaaaaccgccagcaacgtcgtaacgaggggtggggggcaacgaccaccagcgaaaaaggatcttcgttagcggctgagttatacgggccgccagcgaagatatgtccattttcgctagcggtcccttcggagcactgccagcaatgattaattatcttctctggcggagtgatgacgtggaccgctagcgaagatgaacctattttcgctggcggctcgcttaggtcactgccacctctattattttctatggcggtggcttaagcagttctctagtgaaaatagattctcctatataaggccgagcccgagctgccatgccatttgagcactattttctctctcttatgaactcaaacataggggtcgttgtccatggcaacaaagataagggcaacggtggcggaggaggggtaggtcacccgatccggtggcagcgggctcgtcaatatcggtgaaggggagggccatctcggccctcaaaccctacccgagacaagctcatccacggcgacgaagaggtggatggctgtggtagtagatccagtgacgatgggtatcgagatgtagcgcccgttctgtcgtggcgcctagcgggaaaactatctcttaaaaaccctatttgcgaaatctgtttctttgcttgtcgtctagtgtccgtgccttctcagatctcaaatccccgatctatcgtcgaattcaatcccgaatccaaatccttccaaatcaatccctccgcaaaagtctatttcacctcccccgggttcgatgggccgaatccctctcggcccatctccctccctccctctctctctttctctctctctctctctctctccgctctgcccgcgcgccgcgcgcgcgtgcgcgtgagccgcgccgagcgtcccccctccctcgctctctctctccccgcctctatccctggcgaagcccgcggaatcggcccccgcgcaccgttgttcgcgcacgcgcgcccgcgtggtcgccgcccgtgccgcgcctgcgccgtctgcgccgcccggccccgctgccctgccacgcagccgctcggccccgcaagccagcacgcgtgcccgagcgtgccgctcaaatcgccgcgccgccgttgcttcccgcgcgcgcgtgctgtggtggccgaccgcctggtcgccgccgccgtcagcacctgctgcgcctgccgcccgtgtcgtcgctccgctccaaaccgacccgccgtcatcgccgtcgtcatcaactcggccccgcctctccccgcgcgtgcttccaaggaaaggaggcagggctcctcctcatcgccttctctccctcctccttttcccaaagaagcaaggaggcaagccccctttctctcttcctttcttctttttcctcccatcgccggcgtcacctcctgtcgtcgttttggccgctagccgggcgccagctcgccggcttgaccgtccaatgtcggttcccctctcccaaaccgacattgtcgcccctaagctcctccctcctccaatctccctcgtttttgtctctcgccgccacgcctctgtcgcccctgttcgccgtcgccgatcgtcgttgcgcgtgtcgggggagccggcacgagcgaggacgcggaaggggactccgggcgcgccctccccctcctcttcctcggcccgaggccgaaacgatcacgtttcgcgccgtcggctctcgtcactacgcccgcccgcacggtagtgcatccctccgttctccctcctcgttccatctcctccccttagactcgggtagtagcacgagtagcctccccgtagctagctggcgccgccccgacctttgccgtcgctcgccgtgtgctcgccgctgtcgccgcccgagctcggaaacgcctctcgtcgccggcctccctcgatgcgtttcctcctaatccggcgcaagggacggattcccgtagccgcttagatgctctcgccgccgggaatcggcccctcatgacctcgtcgccgttctccccctttctctccaccggtggccgccgccgcaatccgccgccgtcgagctccctccagcgaatccgagccgttggctcgtctcccctcgtctcgtgcaaccacccggtgtgctcgctttcgcctgtatcgccgtgattcgctccgccgctcgccgccgccgcccgccgtccattcgcggccggcgtcttcgtcttcctccagccgacccgcgaggcagccacgtaggcgccacgtcagtgccacctcggcacaaccgagtcggctgacccggtcagccgctccctccgttccaccctccccgtgcgcgcggtccaccgtgagccgtgaggctgcgcgtgggcccgccgcacccgcgtcccccgcgagccgcgcgcgtgcgccgcgccccgcccaaaccctagcgtcgcgtcgcgtgctccctccgcacggtaaaccgtgccgccgacaagcgggtcccacccgggaccacgcaaggtggacccggcccaccgactccccctctcctctccgcccgcgcgcgcgctttgggccgccttcttgggccggccggccccatttagctcggccgagccgccccttcctctcgggccgcgccctagccgcccgagggaagtctgatttccctccctccttcttttcttttctttttctttttcaaaaaggatttaaataaatcctttttccttttgaccaaaaatccaataatcttagaaattcaatatcttcccaaccgtaaatccgtttgactccgttcaacttccaaaattcctcaaatctcgagatctatctaatggcacgcttagaggtcattaatagggctttatttttcgccgtttgttgagttgtcccgttttgcgtgtagtttcggagcccgaagacccgcagtgcgaggatttcgaggatcaagctcaagatctcgagcgaggcaagccacctttgaacatcttgagcctatatttgaacttaattatgttgctaaaaaatattatgcattgataggatcacacttaatctgcttgtcccgtctgcaaggcaaattggcggacctacctatttgttgcatttgatccttcctctgttaactgttataccatgtttccttgtaaccacctagtcgcgcctcggaaatcgtgcactctgcacgagtatcgacggtcgccttcaaacttaaaatctgagtaacttcttgggtaaaacttgggttttacaaaagacttggaaaacccgacacctaggtcggtgcttgtgaactaaatgaattttccgaaactgcggaccggggaacgtatcaggtgtacggtttcccgctcttgcacttaaggaccgtttccttggaatttcatccgaacataagacaagtacgaccacatgggtggaatgggacacccctggctgagtaactagcttatcaggggagccttgatgccgagagacatgtggattcgccggggtggtgtcggggaggacccccgggcttcctggcacagtatggtctaggacctaatctgttgttggtctgggacccctctcatcggcatatggtaaacctgtgtcggctttcgaaatgccttgtcatgaaagcttggaggtctcccgacgtggctgatccccacgggctgggtgatccgggttagtaatgtcgtgtgggtaaagtgtaccccctctgcagaggttaacaaactgttcgaacagccgtgcccacggtcatgggcggatgtgaggtgattcctagcgtagttttgtttgactactgccttgtgaaattgctgttgtggaaaggggatcgatgtttggaaaatctacagctgatgggatcagttaggcccgggtggccgtttgaaggttgttggcccgggtggccgtttaaaagttgttggcccaggtggccgtttgaaagttgttggccgggtgccaaccttgaatcaattcaaaagactgatacattgcacgtactccgaccggacgagacgcactgtctcatccgtgtcgtttgagaagcactcacttagttgatttcagaaaagagttcaaataaaatcaattgcaaaaacaacagcctttccttgaagcctgcattaaacacttatttcccatggcttgctgagtactcccgtactcacccttgctctatataaataatcccccccaagttgctgaagaagatgaagtggatcccgctgacgaggagttcttccaggagcaagccagctacgatgagttttagggtttcggcctagttcccaagtcgcgcctgtgatgtttggtccaagtcttggcttccgcttcccttttgtaaagcagttgtgagctcgggatctgtccgcagcccaacatgactgtactcctactctataataaagagacctctgttgctgtgatattctgtcttcctgtgaaaccagcactgtttcctgggactggtatcgattaacaggttaatttggagcgtcacgggctagttccggtcgggactagttcggggcgtgacacgagatctctagatccggtgatggctgacatccggagctctggacccggtggcggcgattttcggtagtgacagatccggcggtggttgcgggtcggtagaggggaggacggcggctcggctccttcctcctcttaggggctcggttgaggccggtgggaagggtagagatgacctcggtgacttctggatgggcgcgtcttctagcccttcggtgatagtgccatcgatggcgtcgacttctccacggcgatgggaggtaccatggggcggatctagcggcgggtggtgcttggttggtgggggcgtgagcggttctccatggtggtcaaggaggtggatccggcggcggctgccatgacgatgacgacgactaggctcctccaaccccctcccctctccaaaatccgataggtggccagtcgagggccacctggtgaccgcgactcagctcaagcatgggcttcggcgggcggcgacgatggcagccacagagacgtttgcagcgagctccctcttcaccgacgcagctcaatgatggcaactagcgacttggggattagggattggagatttgtgattgaaatttgtgattctgtgcaggctgttttggacctagattttcaatttatttttttctcaaaaatatgttttcgttgtcaggtatcttaacattgccgccaatgaaatcctattttcgctggtggtcgtcttagcttggtcactggcgaaaatcgattttcgttggtggccgtcttagcgtggccgctagcagcacaaatgcattattttcactagcctcaggtcattgacatcacagccggcctccggtgaaaacccattttggccattagcaaaaactattttttagtagtgcttgaaatagacacgagaaggatttgaattacttcattctggccttcccgggtatgtcaaacctcgagaggcaattgagtaggttaacgttccaaggggttttctagaaaataattcaaatataagcatgaaaattcattgaacttctaaacgattgctcgaacggatgaacgattaattggccatggatacgtagaactagtctaagttacagggaacgtagaacttagctaagttcctcgttccgggaaattcgctccggattgaggaacgggaactaagcggaacttcattcaaaaaatgaatgggttgtcgtttcaatacacggtacgaatgatggaggaacttagtagtatgatatgagagaggatgggaagggcaatccaaaatttcctttgctgcacactgccataatgcctaggtgcatatatgagtgcacgctgcaccgccgctgccatcgggaaggggaggatgcagaaatagaggcgtgccgctcgtagcatgcccaggccgtgcggtggagcagctgctccttctctgctctgtgacattgacgcgtgggacctgcagctagcatcccccaaccaaatcttagccatataaatcgctagatccaatctaagccgttggatctacataaccataccctatgccactgatcaatgggctccacatattttccttcacaaaaataattcaaatcccgaaatcaaatatccagagaatattcccagaatattcctttttcttttatcctcggattttccctgaattcaaacttccggaggatataacttttctattcgaactccgattcgacccgttcttcttcctaaattcttctaaaatcgagctctgcctcatggtttaattcgttatttcatttgctgttattagttagctttttcttttgtttatttgtttttcgtttgcgaccgtgtagacgttagagcgaaagagcagttcgcttcataagacgttgtgcaaggacagtcctgagaccaaggcaagtgcactctttgaacatattgaacccatttgtgaaatgttttgttttgaatgcatgcattattttgtttataaactatcgatgattagcgtgacctaattgttattattatcctacccttgataattattgattgcccatgataccttctcaccctagtctttgtgagttgaacattgggctcaactcaaggtagagtagttatgcttagccccgctcaaggttgttttacaaataaaatataattttgattatcatatacttataatcacttttatatgaactgtgtggctgtgtgctatctttccggtagcatgtgttgcaccgtgtaataacaacgggcggataaaaatattttggaccggggtgatgggtggttctgtgtgaacctagctaggtggtaatgtatctgtgtgatcattgttgggtatggtttttgtgtgagcctactgttgagctgtgtgctattgtagtttggcaagttgccttggtcaattaaggacttcacttcataagtcatggatctaagcctaacgtgcaaccacatgttctcatgggaagaacctggcctagtagaattccgagtcttggcactgccggcccaggtggctagatgataggagtttaggtttcgccatgggaactttcttgtctgtgtgagggaaaggtgtctcatgggggaaggcagtgttgggacagagtttctaaaaggccttgttatagactccttggccacacacaacctaaagtgtgaaactggcgcatggccattaaaaggacgatgtatcttgtgggtcaagttgtacaacctctgtagagtgttaattaatttatttgaatagccgcgtccgcggtcatggacatgctcggtgatatctcatgaggggtagtttgtgaaaactgggaatgaactgtgtgtaggttgattaatatagctatgtggtcctgtgtggatggatagttggtaacacccgttatttataattgttgttttaaatctctgtttataaattgtttataactgcaaattgcaaattgttgtgttatgcaaaatagccattgcctttgttgtcagctttgcatatgcatatttatgtgtgcttgctgagtattccatgtactcaccttgcaattcccccaattctagaagaaagggttccctctgtttcctgaggagtttgctgctgaagacgaggaataggtcgtgagtcccagttgactgcctatgggaagttgaatggagctactacgcgtttatcatatttccgctgctattttaatattttccttaggcccttcatggcagaataaatgtaaactttagtcataaggcttatcacaatcattattaatattaaatattaggtttccttcgtgatgttggctgtgatattatctttgtgtctatgtgtgctagctttatcctggactagcacttatacacatgaggtcctattttgggtcctcacgtgtcgttccgaaaaagctaggaacacgttccacctatcattccatagttttagaagaggtatacccctttcgatccatgtttttggaagatgaagtcccacgttcctcgatccatcaatctgggaacttttgtgacttaggaactagtctcagtttgtgcaaaataggctatatattatgcttatcaatatcatgttctatatattgcactaaaaaaagggtgtttttggcaaaaaaaaggctactactatcctaagtttgcggaggggaggggatcatggactgcctatgcaaaccgattgccgtaggcgaccaactaagggtgtgtttagtttgcgaaaagaaaatttttgggtgtcacatcggacgtttgaccggatgtcggaacaggttttcagatacgaatgaaaaaactaatttcataattcccctagaaaccacgagacgaatttattaagcctaattaattcatcattagcacatttgggttactgtagcacttatggctaatcatggactaattaggctcaaaagattcgtctcgtgatttccatgcaaactgtgcaattagttttttttttaatttatctatatttaatgctccatgcatgtgtccaaagattcgatgtgacgtttttgggaaaaaaatttgggaactaaacaaggcctaagacaaatgcatcaggatatgtgtcaattttcacatgaggtggtctggcctgcctatgataattgttatttcctaggaggctaccttaaagaactgccaatgaaaatgaatgtatgcacaaaagtgctcttattagaacgcatgcctatgtaattatatttctccaacgatacccttacttgcttgcctatgttttatttttttttcatctatgtcatccactactttacttctatcagcaatgacatggacgccttggatgtcaaatcactatgtgttggttgcatcctctactaccactccgtctcctaacctcccaccattggcttctttccaacaaatataaatcaacgtggctttgctcaccgtacttctcatttttattttcttctattttcaatggccatggattccccatgcaaactaaagtacatcaccaccagtgaagagaaagagcacctaaagccgtccactaagtactccctgtcatggccaccaccagagtcttgtaaagagtagaacatcgatgatgagcacttctttgacgatgggttgccattgaagccaaactttggtgaggaagaggaggaggatgaagacgaggaggatagaatgaacgaggccgacaattgtggtagtcatggtcaaggccaacacggtacataaggtatggtggtcggcgtgcatgagcaaaagtagggcagcgcagagccgcacactgccagggcacatgatgactgatgattgtttcaaatattataaaggatatgaacattgttgaaggttcagcaatgttagatgggggcctgacaccacattgaatctaattatcaaatcgtggatgtttcgaggttgggcttccaattttattggtcaaatactgtgaagaacatgggtaccagaaacccttaaagactacttatccgactagagatgggaggtggtcagtgggtcatctcaatatagatatagagtcgctagaactcgaccgccatactcccttctatcataagttcgcgtatagatcgccatatactgccttctatcccgctaggttttccggcctcctcctattctctttgtaggtttgttccaaaatcttatgttccgttcatgagacaggtgcttatcccgatctatcaaatgacctgcactagccggtgttgatcttcaaattaaacccatcttgatcgaaaacttctcaaggtcaagctggttagcgactttttagagacccactcaacaatgcaattttaggagtagtagtaccaaatccaacacaaggaacaaccgagtctgttacaatagtggagggttttgaggtggaaaatggaaggatacaagggctagaaggttctagtagcttctagacaagtagagaaagagggaaggtaaagatcgacaaggaaccaagcccggttccaggtcgccaccgccgccgaggaacccctcagccgatcctattcgttctctattcgataccctctgtgctgcagccatgtccctttttgatgattcttcttgggcttgcttgggccgttgtttggcgagacgctgctccagcccataatacagccacaagtccttaacaatccctcttcttaaaattcggcttgtccccgagccgatgagaagcactgccaatcccaccaggatcccaagttgtttgaaggtcttcgatacaaggtgcaaatttatcatcaccaatgagattcttagtttggagcatctcagagtaaagtagactaactgcaacatcactgaaaccttctagcatgttcatgctgtcaaaaaatattcagtagcttgcagtcaacaggaatttgtaacaggtcacccattggaatagccataatcaaatactgagatcccagaataccaagccatctttccaccataagaagacacccaaagtcaaacatatgatctgctttggaaggattgccccatgaacaatgagctcacaacttcatttcttattttgcaatggccttaagctagttgccactgattgtataatcccaaccattttagcagatgcttgcagttgtgaaggagatgcaaaaaattatagattccatttactgcctacctcttgttcaacaatggcaatcacattgttaccagaatgtgcaacaccaaaatcttctcctctttgatcttgagtgtattctgcaatttcttcaataacaatgaaaattataccacctctgtgaactacttgtagagatttgagtaagaataatggatcttcaggatacacgaatctgaactcatgcccactaatccaattctgtcgttgaaaccaaacaagttccagtagcatgcgtgttgtttccatttgcaagttctttgggctgagccccatgcacaataagatcatgttgtctgtttgtgtgggtggtggccaaggttgtttctcttgcacttcttgagacgatcgccacaactccagtgcccaatagcattatcatcacctatgtcccaaaatctctaatgggagtagggttgtggaagccaatcacccaacaagatcttgtgttggtgaaccttgtctttacctggatcccaatgcctacacatgatcagttcttgctcacagacatgctcttggatcaccccaatcaatggcaaccaaggtggcatccattcaagggcggatccagaaacaaaaagttggggggactcaacataccgagtacaccgatataaacacataatctcagtattaaactatactaaaatgctattataagacctttagcacctcctatcttatcaactatgatgaaaaaattgagggggggcttaggggggtatccatgggttttgtgggtgtaggggggacttgagtccccgctgcacccacgtgaccccgagacatttgaggacaaacaaggttagttgcagcacatgtcctttcaccaatgcatagttctgtgtggggggtggccatggatttctcttggggtacttcatcagtggcctcttgtcaccattggggcatttcaacaaacacctgatggacatgcttgtatactgattgaggtcaggcatcaaccatgacgagaagacttaagatgatgcatcatgtactagaacgccctccggctcacccatcatggtttggcacgtgaccctggcatggtatgcgccacccttgacaccaaggcctaacgtcgaacatttagcatgtgtcaccttaggatagtccggggtgttgatgtaggcgattctggttgtgttcttgttagccaccaactccatagaagcagcggctgtgctggcgaaggtaaccctctcaaccatggtgagattgggctcgatgtcggggatggaacatttcatcgaacacgtggtgagcgtaacctcaggaaaatccttggtgatgatgtaagggtcatgaaccttgtcctcaccattcccaagctccaggacgcccgtcggagtagtcccctcgttgatgtagatgaatctctcaattgtgctcgggctgccgccattggggcacttcgtcgaacaggtggtgggcgtcaccttggactgctcatccccaaccaaaaatcgcaggtgttcatccttcttctatatatcgggcatccactattctaccgccaccttgagagacagcagatcagcgcttcttctttgatctacctccattcgcctctgctcatactcctcgatctgcctcaaaatcaaatcgaacctatcatctatggcgagaattccaacgaaccaaatagctctgataccaaattgttagagacccactcaacaacgcaatttcaggagaagtagtaccaaattcaacacaaggagcaaccgagtctgttagaatagtggagggttttgaggtggaaaatggaaggatacaagggctagaaggttctagtagcttctagccatgtagaggaagagggaaggtagagattgataccctctaagctacaaccatgtccctttttgatgattcttcttgggcttgcttgggccgttgtttggcgagatgctgctccagcccataatacaaccacaagtccttagcacgactgtaataaataccacaatacattataggtgaaacatcgtggtgatcgaaaaaaattatcaacagtggcgtcgtcatctcgaggacccatgtagaagtggctggaattatttgggacggagcgagagaagaagagtgaggagggtgaggctgagatgagtggtacagttgggggggacgtgatcccctgacgtactgccctctaactttgagaggatgacatgtgggccgcacagctggtggacccacatgtcagccacccacttcagaggagcctcttccggttggggggcgcccgatttttgtcctgagatcggacactcgacagggagtgttttcgtaaaatatactactatcttatatctcatggtacctcaggaagacctgtaaaatcactctctttataatatccaatgatgccgtacgtgttaggccctcgatggccgaagattgattgatcttgaagaacgagaaagatcgataaatctaatgatgccttgcatggccatatatattaactgaagaatgagaagacaaatctaatggcgtcgtgcttggccatagatggccacagattgactgaagaacgagtagaagaaagctataattgcaagcacgagggcgatgatcgaccacggagtgctgcagtgggcacgtttaaacaacgtcctgtgcttgtgccagctcgagtcgtggtagcatttcacatcgtcgaacagttgagcgaacaggttgtcgctgtagtgcatggtgcacggatcgcccagacggctgaagaagttgatggccgcttcgtcatcgttggacagcaggttgtcaacgatgccaccccgctggagcacggagacgtcctgccccgatctgaccagcgacgacatgagcgcgctgtagctcgtcagcggcgccggagtcccggcgcgttgtccccctgctctgctcgaaggcgatgagattcatcagctgcgtcaggttcgcaagatggatctcgatgcgtagcaactccatgactcccctcttcctgtcgaatgttacgtcgaacatatcccggggcgacctcttcttcctgaacgtgacgccggcctctcgcagcagcgatacacagggtatcagcagcagccgaggcggcgacggagatggcgagccattggttaccgcaggtaactccagctcctcgagcttgggcacgaacttgtcgtgcaaaagatggagtaaatggtcgaactgcccggtgaactccggacgcagtggttgtctgggcacgacggtgccgttaagcttgagctggatgagcagaatcttgactagattgtcctgcgttacggcgccacggaagaaggtgtcaaagaggcgctcgagcacgaagaaggggatctggttctcgaggaggaggaggtccgagtgcagcagcgtgaggccccagccgacgtcgcagagcgggtcgggctcgcccctgttccacttgaagaagaactcgaggatgaagtagccgtcgaagacgctcgtcctctcgctgtagcagcagcgggcgcgccgctcgacggcccgaaccgcccgcacgaagtcggagagcgggacggtcgccgctcgctggaggaaatggcggaggaggcgcaacttgtgctgctccatggcgcggagcgcgtcgcggccgcggtagtaagggccgatggacaccagctgcggctcatacagcttcttgttctcctcgcggatgtgggcggggacacggaagattgtgaaggagctgccgtcgtcgtgagcagggaagagcttttgctccaccgcggtttccaaggagtctttcggagggatgggttcggtctgttccatttcatctttgacaaattgtggctgacaggtagcactaaaacaggaagtgttctatccacccaactggaaactggatgtccacctagctagtaggctataggtatgttgtacattatgtgctgtgattggtgcgtaggatattactggccatcaatctcatctaatgaattttttagcgttcattttatatgatacattgaaaactaatggatgatataattaattatatggatagatcaaatacctttatattataaatcaaaccaataactatacctaataaaaaagtacattaaatttctggtagtatttttcgccttttatttcatccatcattttttcactgtttttttccgttccgtctgctttctttttttttccatccgccttttttccgtcttttttttttgccttttttgtctttgtccctttcctttcgttgcatttttttttcacgcgcggtaacgattcgtttttatctagccctttttttttgctgggccgaactctagcgccaccgccacgtcggtctacctcccccatgcgttctctcctccaattgattgtaaaaatcaattcacactattacctcattattttccctatgatttttccaatcaatatcgctttaatttatcgatctaatctccatttaaaagtcatcgtttttatcccgtgttttatagatttgctccggttttgataaaaatggaaagaggagatcaagtatatcaaaagccctcaaccaattttaggagatcgtgaatgattcgaccggatttgatggaggatcggttctagcatgacaagactatcttccggagattgaagccagctagcagtcacagctccacttgtaggcagtcggctatgtgagctgggcctacagctccacttgtgggctaggtcaaaagaggcaataacgggctgggctgggattaaaaagaaaggaagaaatgaggttttggcccaaaaccaaagagtataatgtgtagcaatcaaaaatattttaacccattgttgaatactgcagtcggctatgtgagctggacctgcagcttcatttgtccttaaatgtattcctataagagaaaaaaaataatacataaaccctgtgcccaaaataatctaatcctaagatttatccttaagattggattttattttactaagggagtatatatgtacttaccacatattactattcactagaaaaaaaatataagtacgataaaaatcctaccaatccttcactcctaattctcaaattaataattaaaatatttttatgtttgtatgtaatagatacagttagaccagcccctcctccgtaactcctttcgctcatgtttatatgatagttaactaggatttatgaattaaaaaatactacatcctatttaactatatttgaataaaatactatcacatggaacaatattataatccttttattatgtctttcgcatccaaataatctttttaactggcagcggtactatattcatttactaactttgatcgctaatctttttaaagaaatatataaatatgtgaactacatttttattaaaaatgttcacatggaacatattctatcccttttcatgtcattctcatttaaatagtcttaacaattagcataaataaatttaacaacacagattattctatcatatattatcccatgaacatgtataggtgaggaagatctataataatacaaggaaaataatatcaaggcccatgtaaaatcatatatttgcaaagaattattacttgcgcaaatatttttccacgtggttctcaccactaaagctattagattttctgaattagtgtcgaatgatcaattctgctaagttttaaaagagaaaattatatttgtaccactaaaatttagtagtactgattaataccataaaaacaccgtgcctactctataccacaaatcgattcaaaacttaaaagaattattttcattacctctattttctctatgttattccctaaagggcgcaaagtatggaggacagggcgtgctacaatattgtaaatactatgacaatattgctaaggtgatggtccagtgagaggtcaccgttgttaatagagctcagttggcttagttactgatgcaatcctttatgagtgtaatgacaatgaatgttgaaattgtgccccacactagtcttaaggggtatggcaacgtcgatgcgaaacccatggtttaaggcataagagaagaaaaccatgatggctatgctatgcttgatgcgttagaggaacatttatatataattttagtgattttatcgtggcgctctaataaaatagagaaaatcctagaaattctaagaaaaaagcaaaacatctaccccttgattttcacttaaattggtgggtccaatattatacacccttagataaaattgatcttaaaacaaactaaatatcatgggtcccacctatcctcctcccgcgcgttgcatgtggcaggtggagtatacgtacgtacatgtacgtatgcttccttccttccttttcctttttttcttttttttccatatatatatatatatatatatatatatatatatatatatatatatatatatatatatatatatatatatatatatatatatacactagcaaaaatgcccatgcgttgcaacgggtaaaaaaattctaatgataatatatgtttttcatgcatagatgacattagtgtcatggagcaggacgggctcagtaagtatgttgttcgcatgtatggaggttttttggtgaacagtatgtattttatggcgtacatatatggatattaggacagagaggtttctataaatacaagagatatttttaggagagattaggagagaggtttctatacatataggagattttgcagcatacatgtacaggagatcaggattacatatctactccctccatcccagaatataagcatttttagagttagacacggttattaagaaagttgataggattaaatgggggggtgttgtgattggaggagaagtgaaggtaggtaggaaaattgaatggtggagagttgtgattagttgagaagagaatgttggtggagaagttgttatattttgggataaattctataggctataagttgttatattttaggacggagggagtaataaggaagacatggacactgtgaagtgaagatggattctttattatattaatggtatattaggtttatttttaagtataaatacggttccatctattaaaagagcacatacctaagacaacggtaatatgtagtggtgatagataagtaaatgtataaccgggataaagtaatttttgtttgaatatcatttgtctatttgacggtatacatattacttttatgattataattaaagtaatctatggtctttatagcgaatatggtgatatatgacttcttttaacattcttgcccgcgcagtctaataatatggtgatatatgattatcccaagtcgccacgtggcattctaataaaatagaaaaatctgaccatcgattttcacttaaatagtagttgggcccattattttagatcgttagattatctttaaagaaaaaaaaactcctgccatccctacctccgtgcaggatgcgtattgtacgctccctatcttcccttctttttttttctctttgtttctttcttctttttctatatttatgaaaaaaatccctacaaatagacatcgtacgagtaagtccattaaacttcttagaaacactcttaagccaccatgtggctcctacaaacgctcctgaccgccacgtggtgctctgataaattagagaaatctaagaaattccaaggaaaaaaaagaaaacatcgtaccattgattttctctttacacaccattagaactatatatgtaaaaaacaaatgtcgcgtacgtccacacctctccctaggtccctcatctcctaacatgtacgtacatccaaagttcgtatgtctccccacccctctcttcttccttccatttatggtagcaaaattatatatataaaaaacacaacaactaaataattagaatatcttataatatatttgatttaatttgaactatgtttaccataatttggcatgtacatatataagaaacatatcatttgacataaacccctttatcgcaaactaaatagtaataaaatattacaaaaagtaacatacatcatgccatcgtaaatgatctcctattatctctcctgctcactttcttatccatattttctagcgagcagttcagtacataaagaaccaaaaatgctatattaactatctattatatactaaaaattcattaaactccctacaaatcctcttaaactgtcacatggttttctacaaacactcataagacgccatgtagtgcttaaataaattaaaagttcctagaaattatgataaaaaaaatcaaaccattgatttcctttaaataggtagatccaataattataactgctacatctcacaaaaataaatccggtacccccacctccatccctaccgtatgtgagcatgcatgttcgtacgtacctccaccgtcctactcatctatgggatccaattctcatatcctatttttaagataacttttcctattttctacctaacacataatatatagaaaaataataatagctaaatgatcataactctcaagttacatgtatttcttagtttatttgactttttgtgttatttataattaaattcaagatccatattgcccatatttactatatagaagttagataatagaagttatatagaagttagataatagctaaattcaagatccatgctgctattctgactacaaatatttgagcaaaatagcacttcgaaaacgatgaatgaattcaaatgtgtgggtctaaagtccaagttcaatcaccaccaagaagcttggaaccagaatgcaaactctgggcctgaacccgatgaaggcggagctacaagacattattagcgagatggacactgacagcggtggcatcatcgacttctacaagttcctggacctagtagcgcactaaatgattagatgaagggcaaggactaagaggaggggggcaaagggagacgttccatgtcttcgacaaggactagaaaacagcttcatctttgccaccgagccccgccacgtcatgtccaatgtatcaagagaggctcactgatgaggaggtcaacaatgatccgtgaggctgatggtgacatgcggatcaccacaaggagtttataattaaattcagaacaaaaatataaaacaagcaatttgattaaaatacacaaacaaaaattaaaaaaacactaaaactataaaaaaatataacaagattccatgtagaatataaaatatcaagagtccctataaaagtatataaaagtataagttataaatatataaaatttggaataataaaataagtattaaaagaagagatcaaatacaacacgatacgagattaagtacaatttaaaatccctaaaaagacaatttagaataaagtaatttgatttgaatacaaagtcgaattaagaatcactcaatcactaaattcaaaatacaataaatattttttaaaagaatttttctatctttatggattcacatgcataacaaattgcatatatatgaaggaattaaagagagggctagcagaatggtaaaaaaaatatatttattaccaatgaaagtttgtcgagatttcctcatgaaaaagagatataataaatactgaattaccagtagaaaatacattactttaattttttattttttagaactattttcggaacaaactaatgcgcatgcccgcgcgaatgcgcgggctatcttcctagttgttagtaataaaaactccaacatgacaagaagaaaattgccttttaccaatcgatgcaaataattagtttatcgatgattgattgcttggtgagtgtcacgcaagtatttcaatgcactagggtcaccatccagcaacatcattcttgatgggaaattgcggcctccagtggaatggaagaattttgaacgatttcagaatgaagtaaacaaacctctcagtgaggatgtaacttctccaggaaaaaaccacgttaattatagtggacaaagtggctatcgttgtctatgtcatcatcaatggtatggtcaccagcttcaaggtgaaaacaaatggtacggtcattttttttggtgaatttcctgttctctccatgctctgttctcctttatagccttttccataatcaaatgaccgtgtaccatttttactcccggaactatttctgattttttgcagttaatgcatggaaaacatatgaagtctcggttattcctggatttgtgctactcggtggttgttataaaacatgcaacaccgttaatatacgctaaaccggccgggatgatctctatacatcaatatacatccagttagacctcttgcgcttcagagttacatagacatgcaaatggtcatattagcttgctatacctagtataactagctagcgtggagatctagtcgggttactgagactaacatcgttatatttattctcatataatatatagcatatacattttcatattttattatcaaaatatattaaaatggtaacataattttaaattatggactaactttactaaattaaccaatgcgtgatattcatattgtattatatatacgtgataactattaattattttagttttgaatttaagctatttttaaattgtacttctatatctactttagattctcttcctatatttcttaacttttaatttcggtttttttattctttataaattttatttctttatgaaatctaaacctttttatttcctattaggttgagttttttttttttttttttacggatggagtacatatattatgtatgattgctgatcacaaccaagcagggcttcgctagcaacaagacgcatcacggtattcatgaacacgaataaattaagaaggccagccaagcatgtattatgtagaagtaaagaaactgtataattaaggtcctcaaggacctcaaagaaagacaaataaaaaggagggaaaaattaccagggcaggagtcgggtgaggctatcgttgtaatggcatacaactaaacaagacatggccaacataggcctgctacattacatacggccattttagccgctcggtttaaccgctagaagggctccgagaccttagcccgagttcaccagttatggtgctgatcggagagttgattgtaggagagttacaacttgaacgcggcgcgacttcgtctgtctattattgctggggatattgattgcgcggggccagaacagtggtttgttgccttggaaacttctaccccaacatctgcaagatgcacagaagatatgtttagagagagagaggatcggaggagataagaagaaaaaaatcatgggggagaggggatgcatgcatgccttgcttcagtaggttctttgggagaaggttgatgctaccgctcccttcagcacttgtggaaggacgaggaaacggatgtgcagaaatgggcggtatctcggagcacaacgcaggaccgtcgagacggggagggacgaaatctagaataggacgatctcccctagccatcgccggcgaagcaaggacagcatgttccaggtccagggatctttggacaggaacctccctaaccatctcgccctcgtataatctttcgctctcgttcttcatagaaagtccactccccatctctctctctcagttcttagaacggtatatgtggtgcaattttgatacaaagcttccaaccccaaggtccactgtttcatagtagtatgtgtgtgtgtgtatatatatatatatatatatatatatatatatatatatatatatatatatatatatatatatatatattctttggaacaattgctcgtatgaccctgtttaaatgctacctatcaatttgatcttactttttaattttatttatttgacccagcattttaaaatcgaagttgccgtctgaccctattttaactacaccattgggattttattttatctggttcaaaatgaccaaaatacgctcagtgcacaattatcttgcaaaacgaggcctgacccatctcatcttggcggtgcggctgatacatcgtcgaggccggcgcggagggtcgcgccaccacgcatggacctacggcggacggaggttgatgtgggggcttgcggacaagaagcgacagcgcatggagacagagggtccgtgcgcgaggcccgttgctgggtcgcgccgccgtgcaaggacctgcaccggacagaggctggggcgggggctcgtggcggtcagcgcggaggcagctgcagcgcggcaatggagcggcggcgtgtggagggttgcgcgcatggcccgtgggttggtcgccgcgccgcgcacggacctgcgccggacggtcggcgcggatgcacgtggaggttcgtgagacttctcgaatggctgctccagctttggcgctagccccacgcactagaaaaagtattttcgcaggcggccaaaagtgatttttccaggtggaggggaggaatgcctgcagtgcaacgactgcgaaaatcaattgttttcgtagtcggggcaactgcccgcctgcgaaaatccgttgaacgaaaaaaaaaatcacggacgcctcgctgccgctaccacgcgcctcgccgtcgtcgtcgccgtccacgccgccgccgccgttgtcgcgccgcagccccgcaccgtcatcgcgctgctgcccccgctggcctccctcctccctcctccagccagatctgggaaggaggggggaggggagccgccgcgccacaccacgccgttgtcgccgccaccgccgccccctccggcctcccccctccctcctccagccagatttggaggggagggagggggaggggagccgccgccggcctcccccccctccggccagatcttgaggggagggagggaggggaaccgccgccggccacgcccagccgtcgtccgcccttcacagccggccgccggcctcccccctcccccctccggccagatctggaggggagggagggaggggagcagccgccggccgccccgccgtgccccgccgccgtcagccccgccgcacccgccgccggccacgcttcaccgtcggcggggaggtgaaggggaggggaggggagaggagaggagagtgaggggagaggagaggtgaagggagaggaaaagacacttagaaaaaagagcaattttacggtccttgaggaggtaccatgagataccttttttttattgtaaatttggtacctcttggtatctaggtaccaaattttacactaaattttttggtatctcatggtaccttctcaaggactgtagaattgctctagaaaaaatatcagcccatgtgccacatatatatagcacggtaattttcgcaggcgtaccttgtgtggtccgcctgcgaaaatgcgctgcttaagtggtccgcagcgaacttcaccccgatttgtatttttgtaggcagctatttggctctaagggtcatatccgcttgtgaaaataaatacccaacgtcggcgaaaatgctattttagtatcgtcgtcgtggtgcggctcacgtcgcaggaggcagtcccactcctcaatcggccagtttagtggtgtcgcaagtgtccgccagattcagaaattttctccaatccatatctgtcctgttcagaatttttggcgaagagagcagttcaaatggatttaggatttagtttatgttctgagatttttctagttgaacatagcagtattttcttgcttgtagcgccgcccaccaaggcagaagaaagagaggttgagttctgattcttgttctattggaaagttctctgaattttttttccataaacctgtacgaatttggttccactgtatatctgtacctctctgttcttcataaagggtataaatggcattttgctataagttaacaccgttatactgctttcacatagtagggtcatacctaactttcgtttttgaaaaaatgatcaaataagcaaatttcgtaaaacagagtcaaatcggtagttagattttaaaacagggtcaaaagcacaattgccccatattcttttcatgaaagatccattgtttccactcggtacttaacaaaagccgaacctgattctaacaaaaccaggggccagagtgttagtttatattgaatgtgtataaaatcagttaaagttatacaaggcataggaatagagtaaagagttgtactctatcctacaatctttcttaagtagatatacagatatgttgtaaccgcaatagtgactaagcatatatagcgagaggtaacgcctgccgacagcatctgattgggagtcgttataactttgacatgttgtaatatattggatttttttagataattgtaatatattggattggagaggagcgcctgtaatcaatgtctcgaggatgtaggctttggctaaaccttgttcacaagtatcacgccttggtattattattattattgtgtttagatcacctacgatgtttatttcacgtttgattctctatgtgttatcgggccactttgtaagacagagttcattgaaagtagtacaaccccttgaaaaatgcgtacataacactagcctctatagttttttaatacttgtttaatctgaatagaatgacaacctgatctgattagacaacgagaacaggaggtcaggaccattgaactattcgaaatctaaccaatactaacgtattctagttttcggatagtgtacatagatatagctagacgtttgtaccgcacgtatatactgtccaagctagtgcatagtttcattcgttcttgaatttgcgctacgcactttcagaaagaacgctaaaagtttatcgtagaatggaataacctattaaaaaataaattgggaatggtactatcaccagaaaccaacattagtacatatcctctcatctcaaatggtctataacataactgaattttgcgggccgtcacaatgaatacatctcaaacgggcataaaaagagaccgattgagatatggacgcacaaacatgttagatgtgcataaaactagagcccgtcacagatgacacctatatgtgacggccctaatttaggcccgattgagatagccttcaatatctcaatccggcccgaacagaagcccatcactgatgactatcatctgcgatgggcgccaacttaagacccgattaagataactttaatacccgccacagctgatattcattggtgacgggcttttatttaggcacctttgagtctcctaaacttgcacctttaaggtcaggcggggcggggggcgggggggcctcaaatcgagccgatgcactgagcgcatccatcccgcttcgcccccaaatcaatccacagtgaactctagatcatactcatcgtcacaacaacaacatcatcatctaaaagaaaagacgaagtcaccgcccctccgccagatccaggagccatcgacgcgccgctgctcgatccgccacaggagaatcttgggacggagggggggggttgaggaggagggggtacaggactgccggatcctcccgcggttaccacaggagtcgccgttaccaccgccgatgcaaatctgccacaggaagttgctgaagctggatctgctgcgggagaagcttgggggcggagggagaggggtaccaccgaatccatccactgcaagcgccgccgccggatccgctcgtggaaaccgctagcgacggtagatcctccacgggggaagcttgggagcgaagggagagggggaggtgaccgccaaatccacccatcatcattgtggtggactggtgggtatgtcgtcgacgagggaggcaagaggggaagggggtgggggagagtgagagtgagagagagggtagggagagcgagagcgagagagaggcgtgggtagagataataggataaggatgcaagtggatatatgggcatgtcggttgatcggcttgactcggttttttggtgtcggttttcaaattctggcacatatatttatatgtgttctttttaattaaccgatacctacaatatattataggtattggttctttcaagaaaattgacatttatactattggtgtcttttgcctttttatataagaaccagcacctatagatcctgaaaggtgccggttctatatttttatatcccatagggatgggaaaatgcctataggtgctggttttagttgttccgacacctatagtgttattttttttttttgtgtttctatagtagtcatagatattaaatgactcctaagatggaatagatattagagaagcccatccaatctagttgtacagatgtttcaactttcaattcaattcaagcaaaacgagttatcttgcgttgcacatgggcaaatcaaaagtatcgatcgggctaataaaaccccacgtagaagtactttgattcacatattttttgttttaagtaaaataaagatttgctgaaagtttcagtactactgaaaaaacagtttttttttttttgctggcagccaaaatagcattatgctggcggccagctgtactgctagcgaacaaaagctagtgaaaataatgcgtttgtgttgacgggtagttggccgccagcgaaaaaaaactagtgaaaataacgcgtttgtgttgacgggtagttggccgccagagaaaattgcgctaagacatcctctagagaaaatatattttcgttggcgataaggttaagtggacttccagcgaaaatagacttctgcaggcggcaagattatgccaaccgccaacgaaaatgattttccaggagataaaaatccccaaaatccctttcttccaccttatccaggaagttgccaaaaaaaatttgaaaatagacatgaacatcattcaagtatcaatccaaatacagagcataacaaatatcaacacattaatagtagctgaacagattaacaacacatcatcatcgcagatatccgccggccgacgttggcccaagcaaacctgccgccagcgtcgttgcactcgaggttatcgtcgtggtcgctgtggactcagggtcatcgtcgtcggacttgagcaccactggtgctggatccacctctcctgagcacccctgccctcctaagcacagccacctcctgcgcaagccgcctcacaactgccatccatcctcttcgccaccgccgctggtggggagggaggaggaggcgccggatccactccccgccgcccccttccccgcgtcactgatgtcgagagcagccaccaccgctgccctcttccctgcgccactcccaaggcatggcggcggcagatccaccctcccgaggctcgatggcgccagattcgctcctgaggccctccccattggccgatgcagcggcggtactaggcagcggtggaggagatggtagccggcagcggtggggtggcaacggcagccggcagcggtggaaaagggaggccagagaagggagggagaaggagagacacgagggagaaggaagagaggcggagaaaccgagggagaagggagagaggtggagagagaccgaaacatagcagtgtttggtggcggttggggtgcgcggtggattttattcgcctcaaaatttattttagtggtcctctttacctaccgccagcgaaaaatagttttttattatggtagacctcttagcgtgcccgccagcgaaaatcggttttcgctggcagttcgtagccccccatccctcgttacatttttgctggcggttttcgcgtacagccttatagggtgatgcgatgaaaaatcgtttttttagtagtgagtcctcaaagagtccttatttatgtgatattgatacatgagatatcataagtagatgtaaacgacgtttaacatcgttaatttttggacgttcattttatttaaaagcattatacaaatataagaaatgtaagtcatgcttaaattatatttgttgattaagtaaatcaccacaaaatagatgataattacgtaactttttaaataataagatgaattaatcatccaatgaatttttaaaagttaacagtatcatgtgtgaaaaaaaataggaagagtagtttgcaatgaatgtaaagtggtagtataatgatataatctcgttttattatcatgcaactaatttgcacccaaccgtggcatagactgctttgctccgtgtctccgtgcactagtaatctttattgttacttaaaggtggagactatcgacatggagattctttcatagactcctctaaaaattgatggcttttgagtggtacatcagtgctctaatatctttgtgctatttaccatctccataaggcggagaacactcgattccatgacacattagaaggccggtagctatcttcatagtgacttggaggtgaggaaccttctccatcataccttgaagatgaggaatctcctttatgatgtctccaaggtgaggggcctctttcaatatatatcgaaggtgtgaaacctccttcattataacttgaaggcgggtagtatccatgatagtaccttgaagttcggggatattgattggaggatttggtccatggatattcacattgatctttatcatccttcgaaggtagggagtatcgatgggggatagtgcagttggtgtatattgagtctttagggctgcgcccttcgtgcccatcgacttcgctctgttgaagggatttgggatccaccctacaccatgtatcctgcggagccataacaccaattggttttgtagtttgtctctccacatctgcaacacacacaaataatatgtacgataatttatttagagagagaagacaacaacaattaagatttgagatcaggaagagagatgcctttcttgttcgtcacatgatcgatagtccctctccctcttactgattcttctatgggtcctgcaggaatcttgagatggggtggaacaaaatctagggagcgactgtcgtatttatttattgcaggggaagcaagatgcagataacccaacatattttggctgcacccttcgtgcccatcgacttcgctctgttgaagggatttgggatccatcctacaccatgtatcctgcggagccataacaccaattggttttgtagtttgtctctcaacatctgcaacacacacaaataatatgtacgatgatttatttagagagagaagaagacaacaacaattaagatttgagatcaggaagagagatgcctttcttgttcgtcacatgatcgatagtccctccccctattactgattcttctatggttcctgcaggaatcttgagacggggtggaacaaaatctagggagggacggtcgtatttatttattgcaggggaagcaagatgcacagaacccgacatattttcagcatggtctaggcaacaccctgagcagaggttttgcttccccttctctctcacacaccctctctatatctgtcctctatctcgacaggggactcataaccatcttcccctctattaaagagtttatatagtgaagtttgcacatgctttaccaacttttaagatcatctgtttttcctatgcatttctctgatttctaagaaaaccaggggcaaccttaaaagacaaaccacaaatctctttccctggataactttacgtgtcagcttgcaaccttcaactcattggttggactcacaagacccctgtttccgtgataatataataaataagtaaaaaaccaatggcgatagataagtaagaaaaaatggcttatttgttgaaagaaaacgaatgttcaatcaactaggcatcagataagccagttttgtattttacactagtcgtgacttcgcaatgaatgttacgcgtaacgggaatcggatatgaacgacgtaccatagtttgacaaaaacatctttaattttcaaatcgcatgcgagggcgatggttctaatcggacatgcggcaagagcaaatcgcgcacgcgaggacatcgcaggcccaatcgggcaagcagaaaatcacgagcgcgagggtgttgctggcccaatcgcagtgacgtgcaatggcgcgtatggaaacggactcaggcacgggcacgattactgcgtgcggcaagaggcacgtgaaaaggcgtggaccaattaatttgcacgcgtctaagataaaagggacattctggtgtaagaaaaacaaaaagaatttgacaaaaacataaaattaaaaccgattcaaacacggataacataccaaaattctgacggaaacatcttcaattttgataatagtagagataaaaaaaaacatgtgtattttattttctaatcgagctacatgtttcttacttgttccttatctgcttgggtgtcttatcatgtatttagttagagatacctttactcgtatatttgggtatgcggtattcctaataagggtaattgtacaggtatggggtgtcagtaagtccaggagattgctacccatcgaacgtatgatattttgcaaaaaatcggatggtgtttcgccacatgaaaaaaaacatttcagatgtttcatcactcattgaataatgtttcactaaaaactgtttcaaatgtttcattactcgatgagaaatgtttcaccacttggcaaaaaaatgtttcaatcagatgaaacaatgaaaaaacactgcttgcaacatcaagactctattctgcaacatcgaagaaaacacatcgtacatcatgttgaacatccgatgaaacacacgaataaaatagagtgcaacaaacatatacaatagattgcaatgcaacatcaaatcaaaataaagtgaaacaccttaatgcaacagagtgcaacaagctaaaacagtaggatgtaacatccctaaactccaactaaacaaacccgtctccatcttcttcaacaaaataaacacaccttcatcttcttcatctccggtcgtcggtgagtccacctccatcaccggcggcgccgccatctactgcggcggcggcagctgttcctgctgcagcgccaccgcgcccaccgccgccgaggatgggggagataggcgcagaggcggtttacctagtaaggccaatggagggcggtgtcggaggagcgggagaggagcccgtcggggtagatgaaggctcacacacaactgagcgcgacgccgatggcgaccgccgccgcgatgcgcgaccccaccaccgtcgtgtcgcgccgcgccaccatcgtcggcgtggtcgctaaactcctcctccctcttcgcatggtcgcgagatgcagtactacggtgttgaggggagagaaagagagaagaatgagtggttgagatagagataaggttgaccgatggagagaaaatggtgtgagagtggttaggtgggacccactcggtgtacgtccatttttttgcgccatatcaaacgtccgttgtaaagcattttttgtaagtctaagtctatggggtaacccatattaactacattcacaacacggtttatacctacgaatcataagagatgttctcgtatctataatactcataactacaaatgctttgagaagagctcgtatctattggttcatgattacaaatgttgcaagtctcatgtaattttttttcaaaggtcatagataacctacccaccctactcgaaacacaccttactctttgcaccctaaaccctaactttcttaaattttggtggtactgaaatcaccggaatccaaagtgtaaaccccgttggtgacgttgagggacggcgaaaataccggatgggcaacaccccgtgccgctactcctcatccagcacagatcatccttctcctgttcttctaccaacaaattgtcctatagtcactgtattctgattactttgtttaatttcgagctctacgatttaaactgaggacagatttgaagcagtttgcacatttttgtgctaatttttttctatcattgcttctttttatcttatttttgaagcccggccgtgaccacgacagataaattttggagtgtgatagggtagtgtcataaaaaagctcttcatggttacaaatattatagatgacttgatcattaacgggtgcttaaatgttatagaaggcaccctcctgaccggccatttaactatctttccttttctttaatatgggaaattgagattcatgtcatgctgatgttatcgcggtacatctgatatctacgataccagatataatgcctataagtatcaaaacttcactggtggagaaaccatctttcgtcggtcggccgatttccacaatagtcccggatgcaataaaaaccggggctaaagatgatctttagtcccggttcaaaaaggtaacgggcatatttgatctttagtcccggtttgtgttaccaaccgggactaaagatcatctttagtcccggttcgaatgctgtcaggacctgtcaggcccccccgggatctttagtcccggttggtagcaccaaccgggactaaagatcttaactttagtcccggttggtaataccaaccgggactaaagatcccggtgtcccggttggtaataccaaccgggactaaagatcccggtgatctttagccccggttggtgctaccaaccgagactaaagatcttaactttagtcccggttggtaataccaaccgggactaatgatcccggtgatctttagccccggttggtgctaccaaccgggactaaagtcccacccctatatatatgtcttcttcctcctccagctgcccgagcaagcttcaaaatttcttcaaaaaagaggggaggtcatgccaaaatttctattgaatttattttggtgattacatacaaatcggaggtgcctaaaaggtttgcaacttcatcctccaatgtttttttttgtcatactacatttgcacctatgttttgcacactttttttgtctccaaaatttagttgtaagttgatgagagagaaaatgtgtgtggggaagaaagaatatatagaaatttagttcatttgctaaacaaggttttataaaatagttgagaaggaaaactctagtgaaagttaatattaaataatagaaaaaaaactaaaataaaaattaaaagaagtaaaacacattaaaattagtttaaaactttacaaatagtttttaagaattatttggtgtaatattttatgatttttgtatgaataaagatatcttataattattgtatgactgtcattattgtaagaataattatttgtgtgcggtttttttgagtcatgtagatggatcggcaatggatgtacgctgatcggcggtccaaagagtttattgacggcgtgcactattttttgagagtggccgaagctaacaggcaaaggggttttatttgttgtccatgcaataagtgtaagaatcagaaggagtattctgcatccaggactattcatttccacttgtttgagtcggggttcatgccaagctataattgttggacatcccacggagagcaaggtgttgaaatggaagaagatgaagtggaagacgacaatattccggactttgctcagtatgttggatttgaaggaaatagctgctcatggtaacgacgttgcggatgatcttggtcagatgttgcaggacgccagggaagactgcgaaagtgaaaaggaggcccataaattggacaagatgttggaggaccacagaacttcgttgtacccaggttgcgagcaggggcacaaaaagttggataccactctggagttgttgcaatggaaggcaaaaaatggggttagtgacaaggcatttggcgatttattgaaactcgtcaagaacattcttccggggggaaacaaattgcccgagacaacgtacgaggctaagaagatagtctgcccgttaggactggaagttcataagattcacgcatgtccgaacgattgtatcctatatcgcggtgaggagtatgagaacctagaagcatgccctgtttgcaaagcactacgatacaagattagacgggacgatccaggagaagttgacgggcagctaacaaagaagagaattcctgctaaggtgatgtggtattttcctataataccacggctaaggcgtttgttcaggaacaaggggaatgctagaatgttgcgatggcacgctgaagagcgtcaacaggacgggatgctgagacaccccgccgatggttcgcagtggcgaaacatcgacagaaaatttaaagaatttggaaaggacgcacgaaacatacggtttggtttgagtacggatggcatgaatccttttggagagatgagcagcggccatagcacttgtcctgttacgatgtgtatctacaacctcccccctggctatgcatgaagaggaagtacataatgatgccgattattattcaaggccccaagcaacctggtaacgacatcgacgtgtacctaagaccactggttgaagatcttaaacagttgtggaagaaggaaggtgtccccgtgtgggacgaggacaaacaggaggagtttaacctacgagcgctgctgttcgtaaccatcaacgattggcctgcacttagcaacctatccggacagtccaacaaggggtacaaggcttgcactcactgtatggatgaaacagaaagtacgtatcttaagcactgtaggaaggttgtatacatgggtcatcgtcgattccttgcagcaaaccacccggtacggaagaaaggcaagcacttcgaacataaggccgaccaccgtacgaatcctaaacatcgcagcgggaaaacagtgtttgctatggttaaagatcttaaagtagtgttcggaaaggggcctggaagccagcatatagagagcgaagatggtcacgcggcgatgtggaaaaagaactctatattttgggagttaccatattgggaattcttggacgtacgccacgcaatcgacgtgatgcacctcactaagaacctttgcgtaaaccttcttggcttcctaggtgtatacggaaagtcgaaagatacactggaagcacgtaatgatctgaagcatatggaacaacgcggcgaccttcacccggaaccaaaggagaaaggaagccattacttgagtccagccagctacactcttagcaaggcagagaaggaaagtatgtttgaatgcttggagagcataaaggtaccgtctggatactccacgaatatcaagcgaataataagcacgaaggagaagaagttcataaacctaaagtctcatgactgtcacgtgttgatgacacaactgctaccagttgtaataaggggtatccttccagacaatgtccgggcaacaataacaaagctatgtgcattcatgaacgcaatttcgcagaaggtcatcgatccggatagattagaagcccttcagaatgaagtggtgcaatgtctcgtcagttttgagttgatatttccaccttcatttttcaatataatgacgcatctgctttgtcaccttgtgaaagagatccgtattctcgggcctatgtacctacacaacatgtttcctttcgagaggtacatgggcgttctgaagaagtatgttcgtaaccgtgctcgtccagaggcaagcatcgccaagggttatggaacagaggaggtcatcgaattttgcgtagaatttatcgaagaccttcgcccaatcggggtacctgaatcacgccatgaagggagactacggggaaagggaactctcggaaggaaagcaataatgacggtagacaacaatttattccgtaaagcccatttcactgttctgcaacactcttcattggtagctccttacattgaggagcacttggctctagttcgcgccaggaacatcggtaagtccgatgcatggattacacggcatcacattgatactttccccgcgtggctacgacaacatctcatgggtaacgagtcgatcaaccaacaacttgccttcctggcgaggggaccgtctgggtctatcgcgacattccagggatatgagatcaatgggtacacattctacacgagagcccaagacatgaagagcacgaaccaaaacagcgctgttcatgtcgatgccatgggacacgatggaacaactgccacgtattacggtgccatcgaggacatatgggaacttgactatggtcctctcaaggttcctctgttccggtgccaatgggttaggttgactggtggaggcgtaatgattgatgacagtgggatgacaactgttgaccttaacaaggttggatactcggacgaaccttttgtccttgccaatgatgtaacgcaagtctttttcgtgaaggacatgtctagcaaaggaaagaagggcagagggcctgatgagcctaagcgtcaagtggttctcccaggcaaaagaaaaatcgtcggagttgaggacaagactgacgaggattacgatcagttggatgggcaaccccctttcacagtgacgattgaccctagcatcctcctatcaaatgaagacaccccttactcacgcagcgatcacaaggagggaacaatagtgaggagaaagtacgtgcggtcaaccgtcaccgccgatgtaatgccgtaattattgtgtacacgatgtaaactattttggatgtattgattatacatataaatcaattgatgtatgacatatgttaattacgcacgattattagaggtttcaacaagtttaaatcatgtatatgttagttatatgtgatacttacaatttttaaaagttttaaatcacacaggtggcaatttcatatgtatgttaattagagtttttaacatttaatttactagcattcatatgctaattataattgactagaggatttttaaaagttttaaatcacgcaagtggcaatttcatatgttaattagagtttttaacatttaatttactatcattcatatgctaattataattgactggagaatttttaaaagtattaaatttaatatatttttaaaactatcattcatatattagagtttttcacaatttaatttactatctttcatatgctacttatatatgactattcgaatttttaaaaggtttaaatcatgcatgtggcatttacatatgttaattagagtttttagcatttaatttaatataattcctacgctaagtacatatgatgattacaatttttattaattttaaatcatgcagtatgtacattaatatcttaattagagtttttaccaatataataatatcattcatatatatgctaagaatatatatatattggaatttttattaattataagtcatatatttgcttattacgatttatccacttaatttattacagacaaaaataatttttcgaagtaattgtcatcaatctttgtactttaaataatgttaatgcattaacttctattttataaacacatatgtaagcgaaaatcatatgcagtgctataatctttagtcccggttcttaaccctaaccgggtttaaaaagaatttcgaaatagcgggaaaagatatttactcccggttgttgagaacaaccgggaaaagaagttaatgcattaacttctattttataaacacatatgtaagcgaaaatcatatgtagtgctataatctttagtcccggttcttaaccctaaccgggtttaaaaagaatttcgaaatagcgggaaaagatatttactcccggttgttatctttagtcccggttgttatcaacaaccgggagtaaagatcccggttgttgagaacaaccgggagtaaagatccaggggtatatatattcccggtgcgccctcgtcttcttcaccaacacttaaacgttttcggccgatcgatctctctcggcctctctctccttcgccgccactgcctagggcaaatccccgcgccgacgccgccgtatctcgccgtcgtctcgagctcgtcgtcctcgccgccgcctccgcctcctccgctgccgccgcatctctggggtgagagccgccgcatctcccttcatgcatctcaatctctccgatctcgatctctctccgtcgccttcgacgccgccgccttcgacgccgcgcaatgccgccgccgcatgccaacgccacgccgccgccgccgtcgccacgccgccgccgccttcgccgccgcgcgcgcaatgccgccgccgccacgccacgccacgccaccgccgccacgccacgccgccgccgccacggccccacaacgccacgccgccgccgccgtcgccacgccgccgcgccaaccgccgccccgatgccgccacaccgccgttaacgaacgagaacgagaacgatcgaacgaacgagagcgagaacgaacacgtcaacgtacgttgccgcgacaacgtgaacgagaacgagaacgatcgaatgaacgtgaacgagctagggaacgtgaacgagcgaacgaacgaggacgaacgttaacgtgaaatgcaatatatatatatatatatatatatatatatatatatatatatatatacatgtatatatatatatacatgtatatatatatatatacatgtatatatatatatatatacatgtatatatatgttacttcgcatttatcctaatacattttttttatcttgcagaaaagacgtgttgtcggagtcgtccgtcaagcctgagtggaagagctagccctagaaggaattggagcaggcaagtgacgtaataatataaatgattgttatatttgtaatgcaattaattaagattattagacctgtaattagacttatcatataagattgtgtagtgttctaatattatttgagttttaatataagattattttattgcaaattagacttagtatgacattattgactacggaattggtgcgactcctaacaattgactattgtagtcttaattagacttagcatatacgcacaaaacacttagcatacattactattttagtcttagcatgtaatattatttgagttttaatataatattactttatttgtaattagacttggtatgtaattattgactacggaattggtgcgacaagtagcaattgactattgtagtcttaattagacttagcatatacccacgaaacacttagcatatacatgactattttagtattagcatgtaatattatttgagttttaatataagattattttatttgtaattagacttagtatataattatttactagctagggttgtataatatacgtcacctagacttagcttatatcacgatttgtaattagacttagcacgtaaggttgtgtagggttctaatgtacgacatttacacttagcatacatgaattagattgttaaaacataaatgtctcgtgacttagcagatgtttcttgtatcaacagatggctgaccgcgatgaggaacagatattgtacgatacaatcgcggagggaagcagccagtactggaatgaagaagaggggaacgaggatccaaaccagtacttgaacgaggaagggaacgtggagagggatgcggaggggaaccagcaggggcacgtggaaagggatgtggaggggaaccaggaggaggaggctagtggtagtcaaccctccgttggacagaagagggcacgcgggcaacgaggtgcagcgaagaaggttgagggtcggcacatcataacggaagtggaagaagatggacgtcctagtgccccggccgaagccgccaagaactatgtacgtcacagcggttgggttgtgcgggataacgtgcctgtcagtacggtgtactggcgaagaacaagggcacgcggagatcatgagagctttgtcccagattcggagaaagagatgctgtggaccacaatgctcgagacattcacccttcctgcgggtacagaggacaaagtgaaaaggtggactctgaagaaaatggcagaacagtttcagagcttcaagggagatctgtaccagaagtatatactgaaggggcagacaccgaacttcgacacattcccaaagctaagggatcactgggacgagttcgttgcatataagacagtttaacaagggaaggcgatgatggaaagaaacaaagaaaatgccgccaagaagaagtaccatcaccacttggggtcaggaggctatagcgtcgcgatgccgaagtgggagcagatggaggctagcttgattgagaggggtatcgaaccggcaacagccaattggccggaacgatcgaagttctggtactatgctcacggtggaacgctcaacccagctgatggctcactggtcttcggctatcagatacaagaggctgcgcgacgactaacagatgcagtggaggcctcctctcagggcacgttccgaccagacagagatagggacgagctgacactcgccctgcagactccagagcatccaggacgaactcgagggaaaggggtgattccttggaagattggtttcaaggaggacatccacacgtacaggagtcggatgaggagcaagagagataccgaggcgaagattgcagacctagagttccgggtatcgagctacgaactcaacatgcaagaggaggtggcaaggaaggttgatgaacgcatggccgcacatcggtcccatgatccccagccgaccattcctcctgcaatggtgagcccgtcaggaaaccgtagcagctgcgcctcaacggggcaggtaggatcacagagcatggacgccatgcaaacacaggacgaatcgacctgtcccgttgatgacatcactcagcggacaccatgtgagctgcatattcctttcaagaacttatcaataaaggtaagatttagccattccgctagttgctgcttatatatgttgattactaataaataatctctcacaacatgaaggtggcgtcgggcatggccatcccaatggacccttacggtacttaccactgcaggccgattccagcaggatactccaaggtcgaagttgagttggtcgaaggcgcgtacgaggacctcgagctggattaccctggaggagatggtgagacgcatctacgagacacatgccatgccattattctatggcgcaggcggtacatcatcctccctgggcgacaagcggcgtctcgtgcaccatctcctccggctccgccatctcctcctcaggatcctgcaccgtctcctcctcatgctccgccagcaccgtctccacctcaggctccagcatcgactcctcaggatcctgcaccgactcctcctcgtgctcctacacctactcccccgcaagctcctcttccggcaccttcaaagtcaagggcccccccagctccaccgcttgcccacacaagggcaacaaagaaggcgaaagttgacgccgctaagaacaaggacccggggtacgattgcacgcaagaggagcttgacgcttacgttgcatcagaagtcaagagacaattcaagcctcgaagtccagaaaagaagattcctatagaccccagtgtcaggaacttcttcaggggtatgtctgcatctgtcaaggaggccatcaagctatcggactatgagcgaacgctgaagaaagcatcttctggaaagtccaaaccagtccctcagcttggagagcaaccaaaccaggagatcgagccgttggtgaccggtaaagaaatgacgatagaacaatttattactgacaccggtctaactacggatcaattgctaggagtcgcaccaatcgaaaaggcggaagtgaaatacatgtacgaactcggtaaaccgcttgtcaagcctgagctgctgcagtccctacccacacaaatgtacaagttccatcagttgtacatggagatgagcgccaccggtagagagatgatcggagcgaggatcagggacacggacttcttgcaaggagatgacattctctggatcaatttcaggggaatctacgaactataccagctggacgccctcgacgtctctattatgagttgctggattttgtaagtatatcgttcagttagatttcttactatacgtctcctttcattaattaggtccttgtatataagtagaccatagaaaataatatactcccttttatcgttgtagaatggagattcaaagggcccgacggcggagggttttcgatactggattcatcgaccctcggaaagtaaacgtcgcaatgctcggccaatatccacaagaaacagaggacaatctcgtccatctcctgaaggcgcagcattacaagacgttcatactgttgccatacaacacagagttagtttaattttactgtcttcctacataccaaatttcattcccgtacgaacttgctaagtgtttcatatgtaatgcatcccacgcacattgcagattccactgggtgcttttactcatcgacctggaggcctgcactgtcaacgtatatgactcaatggataaaaaagagtctacgtttgacaaggttttcgaacttatagacaggtaccgtcataagttcctttgttaattaagaaaatcttgttatgttaattgctactacgaatcatagctttaaactccatgtagggcttggtatcggttccgtcatttggtccgcggcaaatggagagaaagacttaggcggaagttcaaatttcctgtgagtacacatgctctacatttatatttctccgattcaaatacatacaagtgtatattaattagatctctcgttgtttgtcatttatttgtagtgcgcaaagcaaaagcagggaactaacttgtgcggctattacgtgtgcgagtattgccactgtcttgcagaccaaatcatcaccacaagagagctcgatgtacgtacaaataaattcaaaatttcattacgtagcgatttcttgtttaattactaatcaatttcatacattcatatagtttattcgcatgagggataacctgaccacacacaaggaatttatcgcggcggttcaagaacaactcatgggattcatcaacgaagaaatccttgatcccaagggtgaattctactacgacggaaacacaattcaccggtccttagcttctgagctagcagcgagtactactacgtcgaaatcgtagctagctaggacatataatggattgtaattaatacatgactacatatgtttctatatgcatgtgtacacattttctataatgtaaatatattttgttcatatatatatctatatacatatgcatttgcataacatatatatgtataaatacatatatatatgtatgcatatatatgtattgaaacatatatatgcatggtttatatatatatatatatataaaccatgcagcaacaggggcatgcaaaaaaaaaggtcagctctatctttagtcccggttggtgttaccaatcgggactaaagatcgatctttactcccggttatttcacccgggactaaagatagcgatctttagtcccggattggtactcccggtttggaaaccgggactaaaggggggttacgaaccgggactacaaagggtttctccaccagtgcttgatacctagctatcacactaacatcagcacaatatttgacgtacagaatatagtattgagggtaccaaattaaacatgatatctatggtaccagaatttggttattatgctaggtaccatgctaaagtcatcatgacgtaacatcaattatttcgttccaatggtacaccatgtcgtagtattatttttatatatctactattataaaaatttaaaatatttttgtcagttttttggtacgtcattcgtatttgagttttagtttttaagttcgttcggttttaaaaatatagacaattgtttgagtcgaattttaagtttgtttgcttttggaaatataaaacgagtcgtataagaaatatctttaaaatagctcgtatgctaacttgatatgaaagttagacttcttattacagctcattattttttttaaaaaaatagcattcacctgttgcaaggcacagattttttttttaagtacaaggctagaaagagtcaaagttgaatcgtgaactgaacgaaatatgcaatggtagcgacattctttttgttaccaggtaaaaatagtggctgcaagactgaaattacgtagttcttaataatttattaagatggcaacaattaatggaaatctccctccttcaccaagaaaattcttgtagtcacccggataaacgtccactcatttattttatattttcaaatagtagttgacaacaagatagatagactgatatgtaatatgtcattctactaagatttgattagtatacgtatattcgtagtcaaatatattatttttaatacaacttgtaaagtaaaaaaaataatcttgcatacgtatgaaatactatattacatagcaatttttatcttcgttaatttcttttttaaaaaatcattttttaaaaaaacataacaatttagttgatatgcatcaaaccggtaatatgcatgtaacacaaacatgcaagttcaaattcaacttctacatctcatagaaaacaaattaaaccgtagctagttaacgtatattcagagttaaatttatttttttcgttgcgagatgtagaagttgaatttttacttgcatgtttgtggaatgatatatcacatattaatatatcttcttaaattttttcataactatctattattatatactaaaagtccattaaacttcctagaaacgctctcaagccgccacatagcacccctacaaacgttctcaggtcgccacatggcgctatagaaaatcaaaacatctagccatcggttttcattaaatctggtgggcccattgttttccaccattagatccatattgaaaatttaccatttattttttccacaatatagaatgtacatcgctgcacgtatgtacgtccgtacatagcagctcctcccaaaaataggtacgtacttttttttctttttttctttcccaaactaataatccaattccatattatctatgcttttatgctttgagctataaaaatatatctgattagtattattaaaagttactcgctccgtacggtataaaaaagcatgtgacattactaaattatggttttacgtacttttttgctttctcaaactaataatccaattccatattatctatacttttatgctttgagctataaaaatatatctgattagtattattaaaagttactcgctccgtacggtagaaaaaagcatgtgacattactaaattatggttttatttatttatatattatttgaaaattaacgatcaaatatattattttgacaccaatgtcctatatctcctacttcgactacatttgatctagctcattggctaagctaaaggtctattaaactttctacaaacactctcaaaccgccatgtggtaatcctacaaacgttcctaagctgccacgtggcgctctaataaataagagaaaatcttacaaattatgagaaaaaagaaaaacatccaaccatcgattttcatttaattcaggggacccactatttttaaaccattagattagatttatttaaaatacatcccacgtatatatacacgtacgtatacgtacttccatatattgctactcgtgaaaaaaaggaacaaaatacgtaattatgattgaaaaaaagaagaaggattagccatgccacggttccacctaattgctatgagagaaacgtacgtacgtgctgctcaacagaaaaaaaactgaaaaaaattctcatatgtataaacgtgctactatccatgattgagaaaaaataaaatctcccgggtatgtacatactacgcacagttcttccctactcgaatctttacacatacgagaaacatccacccatccataataaacttatctaaattagatgtatacatggaaaatactacgactacatttgatattaactatattttcatttaaaaattatcacatggaagcatttttagctctttgcccattaaacattctgtaaacccgccatgtagtacttctacacacacttctacgccgccacgtgacatttcaataaattagaaaaatcataaaaattatgagaataaacaaaatatctggttgtcgattttcactgatatgtggtggacccattgtgcgtatgtacctcctcacctatatcttttctcttctattttcctcatttagttagatgaaaaaaaaaatttatgttaacaaattttaaacaactatactatctaaatcatatagctaactttttattggtgtacaccattatattatttagtataaaacttaaaattaaagaaccaagttaacgatatttttttcaaaaaaaatcattactttggtcatacatattctatgcactagctattgttcactaatccatacatttttaagaaaaacgtcaaatagattttaaaaccttttgattaataatacacacttaaattagaacaatttaagtagtttaattaaaaatacaatacctaaagtattttctaataatcaactcaaaactaggacccattaatgtatcttgagaacaataatctcctcccatcctgctttacgtacgcctttaccctcccctataactctcccatcctctcttctccaattcaattatctcctcttcttttttttaactaacataaaataaaaataatcatagctattgttttatttataataaaataaataaataaaaatcacattagctatattttactatataaaatttaaaatacatcatttaaaggttgaccctatcgtggcttgacagctaaacaacaacgaaaaattaattgaacatatgtattatattatactaaatcactgtacgtaacaaaaatcaattaaacgccctccaaagcactcataaatgaccatatatcatctcctaaaattctaagaaaaaccaattaaattgatgcatccattatatttgactattagatcaattttattaaaagaaaatcttaagttgccatgtgtcacgtcctataacagaaagaaccttagaaattcttaaaaaatgaaataccccatcatcggctttcacttaattcatatagaaaaattagaaaaaaaatctcctccacctcctccttgccatcacatgcatacaacactattcgtcacctccctattttttatctattaaactaaaaaagaaacaacaaatactgttggatattttttttagaaacaaagacctcttttttatctattaaacttattaaactaaaatagaaacaacaaataatgttggatatttttttcgagaaacaaagtacatatgcccctatgaacgcataccctactcctatcaggacctctgagagattaggccgacatattttgagattgacgaagtcaccacgagcgcctcactgttgacggatacgtcgtctaccactgaaaaaaaattcaagtttgggacttgaacccgagtgggaaagttccaccacaaggaaactaaccagttgagctacgttcacttcgcaataatgttggatattaaaacaaccataatttttaagctacatctctggaatattcctatgccttttaaaccggtggaaccattatttctaattgttagatatatatatatatatatatatatatatatatatatatatatatatatatatatatatatatcgttatatgtattcatggtacatcacatttcaaaaatattattgtgcaattatatttcgtcgttatcgtattcatgttaggttgtgtagtacctcttacccactctacataatatgttcatagatagactgcctctcaaattatgtcaatcatactaggctatatacaatttagtggagcttcatgtcccacccaaatcattctctaataaaccatgataataggtatgcaattaaaaagaaaaacatcttacttttattttacacttacttttactttcgttgacatgttgtctaaagaaaataagtttaccttcttttcaaaagatgaagaagattataaataattgtttatagatattatttaaatatgatataatagaaagctaataggttagaaaattgtaaaagcaattaatgccgacgaaaacaatttgggaaaaatcatggcagatgttctccggttaatatttcgctcttatatgtatctcaaacctattatcatatgacacatgcccgcgcattgcgcaggctaccttcctagttctagtaacatgcaaataacaaagggatatcagaatccacttccctctcgtcgaccgagtaagtgagcagctgcatatagctgatcccttgcacccgctaacgtcataggaagctagctagtgaagcaccagaaagaaagaaagaaagaccatggaaacggccatccaacgaaggctcgagcaaaacgacggcgagagcagctccttcaccatcttccgtgttcccgcgcaggtccgccacgaaaacaggcagcactacgagccccggctggtgtccatcggcccatactaccgcggccgggacgagctccgcgccatggagcagcacaagtggcgcctcctccgccatttcctccagcgagcggcgaccgtcccgctctccgacttcatgcgggcggttcgggccgtcgagcagcgcgctcgctgctgctacagcgagaggacagccatcttcgacgacgacgacgacgacgacggcttcgcggagatgctactcctcgacggctgcttcatcctcgagttcttcttcaagttaaactgtagggagcccgacgcgctgtgcgacgtcggctggggcctcccgctgctgcactcggacctcctcctcctcgagaaccagatccccttcttcgtcgtcgagaccctcttccacgccttcttcagaggcgccgtggcccaagacatgctcgtcgcgctcctcctcctgcaactcaggcccaacggcatcgtgttcccgaagctgccgtcatcatgtccggctccggcgccgaccgggaagatcaaccacctcctccacctctatcacgagggcttcgtgcccaagcctcacgccccgctggcgacggcgccaagccgccaggagggcgcctctcgtcggctgccactggtgataccttgcgtgaccatgctgcgcgaggcgggcgtcaggttcgtgaacaaacggtcgccgcgagacatgttcgacataacgttcgacagcaacaagggcgtgctggagttgccgcccgtggcgatcgaccaagccagcctcccgctgctggtgaacctcgtcgccttcgagcagagcagggggcacaccggcggcgccgccgccgcgccgctgacgagctacacggtgcttctgtcgtcgctcgtcaggacaggggacgacgtggacgagctgcacagggccggcatagtcgacaacatgctctccaacaacgacgacgcagcgtccggcttcttccagcgtctcggcgactgcagcacgatgaactacgatgaccacctgttcggcgcgctcttcgccggcgtgaagcggtaccacgacgcgagctggcacaggcacaaagccaggtttctgcgcgaccactgcagcaatccatggtctgtcatcgccttggggctcgccgtgctggcatttgtcttttccctattcaaccaattagttgttatccacagtctaatccaccataatggatagtggatagtgatagtgtactgcatgataaattaaggagtactagtattaactattataaatttgagagatggatttgtttgatattttttaaggaaattttatataacaggctatataaaaaatgagagagtggccaatctaaaaagaaaacccctttagaacgaagcctgaaaagattgcaacgaaattagcagcagcaagaatctctaaatgattttgtgctcaaaatcgacagaaagcagtgagtatgtgtctacatagatgtagcgaaaccgttaatgtattaggcaattcccttgctttctttaatttattggggccacctgaaatcctgaacatacccgaatgtggttcgctagtagcaataatcctatcggtttttgctatcatgctgtccataagatccgagatccatgatgatagggagaggaaaaaaatttcaagcataaccctatttttttcatacttttgtccaaatatgattgtgaaaattattttttgcttaacccgaacatctttgcattttacaaagtgagtgtaactcaattgattaggtttctagcaatgaaacctgccacacctaggttaagtctagacttgacacgggtgttcgtatataggactatttttttttcaatggtaggcgatgtattcatcgacagcgaagcatggtgaattcgtaaatctcaagatataccggcctagtttttgaaggtactgataagggtgaggtgctagtatgtgcaatataattggatgtgtgcgcgtttatataatttcgtgcatctacactgtgtttcggaaaaaaaaaatagaaaggacatctatgcatttttacacgtcgctagtcttttagtctatatatgtaaaaataaagaggtatcagtgaagatggtacttactccgttttatattataagtcgttttaaaaatattgctatatttttctttaaacgtgattataattaaaataataattagaaaaaaatcaaaatgacttataatataaattataaattataaaagaataaattgtatccatgctacatcaacttgacagttaaatacaatttggtgtaagaacttgagaaacgagtgttctagtgaaacaacttggcaggtagatgtaatttagtataagaactttataagtgatcatataaatacaacaatttgtaaggtaggtacgattttgatacaataaattaagaagttatgcggcaacttaatatcattttttggtgtataagcagatttatatttttatcctaataactattaattgaaagtcaattaaactggatatagaaaaccttatatttcggttgatatttgagaaagtgaagaaaacaaaaaaaaatcttaagaggtaattggatgtaaattatatgtgcagtataattcttaaatattaaattcaatattataaggtaatatccgtaggattagtatgcaatggcatattgataacgttaaaaagattcatctagcatatacttagccaagttgatccactaaaatactaaattgtcaaagtctcgtacttgaacgtatcctcttgtcaagttgttgcactcagatgtttaattctcaagttcttatactatatcgcacctatctgccaagttgttatatgatgggtataatctacttcagaaacggaggtagtatttctatagtgtcatcgtcccgttgacgactcgatcagctggagcgcccccaaccactcaaaggcgtgagctgcatgcgccaccaaaaagagtccttcctgttggctgctctatcgccggtgatgaggtcgcaaggcgcgccggagggtctcgtgcaagttgaactttgcgcgcaccgctgaagtcaggcgccgcgtcttcttgcttgaaagttgtagtcgatgtgtcaccggccaatcgacctttttcatcatggaacgcgcaaattaagtgcgtcatcgcattcgagcgcgacagcgcgaaaacacaagtttcacacaacgggggattctgcgcagttacgcacgcgcgggccacgcggcatgccagtaaagatatgctgacaccccacacgcaagctaaaagactttggttaattcgtcttctactgttctatacagctcgtagcaacggaaaccatttgcctttcctggcgtatgtgtacaccggggacggagttgctgcgggcaggcatgcacgcgatcgagcggtagctttgacagacagcgagaggcaacgcgtggtaaacccttgcgtgaaggcgtgtcaaggactatttcatatatcatcattcatcagcaccatgcaggcactttcagaaaccatatttcatagaggatgaaatggaccttttttgtcttgtactctttgttcaacagagtacgtcatgaacgttgacagctaagctcacgatcaatgtggctcccttgaccttgagttactataggatactaggatcgacacatgtacgtgacatgtcaaaccaacccatccaaagatgggatgaatggtagtggaagaaacaagggttaattcgaaccatgccattacaaatgtggctattaaaaaataccattacaattcatctattcgtaagcgtgccattcaaattttacgaaattagaaccatatataccatcgtcgccgtcacattttccatcttccttcccatttacacgtggggctcacccgtcaaattcatcttcttcctccatccacccctcttctctttttttcgttctttcttcccaggcacagcagaggaaagagaggagcggggcgccggtgctccgattgctgggaggtggcgacaccggtggccaagtgtgttcccgagcttggctcactcaagtgttgatgtaaaaacatgaggtctgggagatctgcttaactccagtacaggtccaaaagcttgcctttaggtgtataagcgtgccagttgatttgatcctgcaatcaataagaaataaagacaaagaaaccgcggttaaatccataaacgatagccgatcggctagtggccgatgacgtatcatttatctttgagccgatgttatatgtagatcgatcgacagtcatgaataagtaagaaagaactaaatctactcgatcgactgtagatattaacaacatataacccttatgttgatatatacttaaatcaagtgattgggatagatcggtcgccatgccgagacattataaatcacttagatcgaaatatatactaataacaagactatatatgtttatagcatagccgatcagatagatctagcatgtatcggctaatactccgatactactctatattaaggtatcaaagcaagtagaatatatcaaacaaaaagcctaatatacttaaatgcaacaagatcttaacataaagggcagatttaacatgtcgatcaagcatataggataaatatagttaaatcaggtaagatcggctgaaaccccaatgctaccccaatcggcaaccaaaggcaggctagagattgagattctaatcatgacttgtaagatcaaactcaactgatgcagctataagtatgaaaagaaggacaatatctagacaatcaagccgttggatgtttcatagagtggtagatatcttatataatctaaatcaacatcgatatataacctaatcggctgccttctagtaacagacgttagccgattgaaggttagataacgatattgccaaagattatgtaagatatatgataactcgacgaattatataaacaagattagagtatcataaagatggaagcactaatcacgagaacgcaaaccgccataacaagttttacctctagtcgaagatcaaaaccgatgcagctcaacccgaaagtaagaactcgtcgaaacaaaatgaaactaaaagggtggcgatgcgccgagattgtattgaatgtgtgttagattgattacatggggctcggggtctatttatacccgagattacaaaatatgtccatgtcggacacgactcttatctccaacaaactctaagataccataagtctttgcggcaaacttttgcccaaacatatctctaaagaaattacataaaatatcataattaatagatacaattgccatctcaagactctatccatacgtggcaatcctcatgaaggacatcaactcaatctgacaacgtacgccgtgtcatattgtcagattcagctcaatcggctaaccttgtctaactcggactctgccgatcctggtcgcagccgattcggactttagccgatccttgctctatttccggaaggatttcaatctcgaatttcactctgttcctatcttcatctttgatactcagattaccaaattcggttgttaacatcgaggaaggtaccagccggtacagagagcaagggagaggacgtgactcccgctcgggcgcccgatgggaggaggttaaaatcggacgctgacgtcagcatgacgttagtgcccgatttacgtgcaaaactactttaaactgatttttctcttgaattacttatccaaatcatgacccgattgtaccattaaattcattccaattaaatcttcaaaacaagaccacacatggatatattccgatgaaaaaaagcttattattgaattatttttaaatattgcacgatgttccaccaggtatatcggaattgtttcactaagtagatcgaaaatgtttcactcgtttaaatcgggtattgtttcaccttatataaaaacaatgtttcagcaaatagcgaaagaatgtttcaggtcactacaacgttagatttatacatagtgaaacattatgagtacagcagtggaaacatttttcggtggaacaaaaaataaaccaaattcccttaataggggatttccaaaatatgtgggttttttgttgcaatggaatgtttcattcactgcaacattagatctatacatagtgaaacattgtgagtgcactaggtgaaacatttttggtggaagtaattaaaccaaatttccttaatagagagtttgcagaatatgtcggttttttgttgtaaaagaatattttcattcactgcaacattagatctataaatagtgaaatattttaagtatactaggtaaaacatcttttgtaaaaaaatagtagggagaagtgggtgggcccaacaggtgcacatgtggggggagggggagcgaccgattttcctacctcccccggtcgaccgatgctggcattctcccaagggagatggccagaacggcagatggaagggcttggctccggcggtaaagaaggtgatggtggtggtaggatggggtggctaaaagagagggaaaactagaggaatgggttctcctcggcgagacaaagtcggtggtgcgaggatttggtgtgaggggaacgagtgagggagatcgaccgatgggcgatggcagctggtggcgccttctcttctttattttccatctctctccaaatctttccctcgtcgatggtgttcgcccgctgctgcgcttgctccccatgccgccaccgccggcggatgctgccgcggggttccattgctgttgccgctccagctccgcacgtgcggcgcagctgctgcggcggccttatgcagctgcactgctgtgctgctgctccgctactgcggcagctgctgcgccgcaagctgctgcgcgactatgcccaagaaaatgattagctagagttatttccctgaccgatggaccaacgactagttgttcactttagattttcatgtttctatggagtttgaaccataataacatatacaatgcatctctcaatttaaaattctggagtatccgagatcccaggagtgtattatgaatggtttcagttgacatgacgtattgactgcaatcaactcagcaaaatacccctccaaatccgagcctgctttagtctaaatcttaaaataaacaacttaaagttgttctgttttcttcttcggaaaaaaatttctgattaaaccttcaaagtgacgtaaacaaagtttaacaaatacatcaatctgataataccagagaagaggatgcagtgtgaaacagaggtctgcatacattttcgccttatgaactcttatccatttttttaaactcagatagaggtaaacacattggccccaatatttccttgctcttcaaccacattacacatatccttgagagactaaggctagcagtagctatgaccccaacagagagaatggtttacgggccataacccataacaatttttaagacaaactagaaaggtagcccacgcatctgcacgggcatcttatttaaaccatcataatttgtgttattaggattgtgaaattttatgactttgcctctcggtgaaaaaaagttaaaggttccttcataacacatgattgaaaaaaaaaagaatagaaaaggtacaaaaatatgataggaatacttgtgtaaaatagagtattgaaaagaacggatgttttaatagagtgtagacaatcacaggaattgaaaatttattaacccacctggatcaaaatatcatctatcatgcataaatcataaccaaacaaactttccattagcagcttgattgcctagatgctatgtgaaggaataaaacatgcacggacatcttgtttttattttattgccgtggggatatacgacgacttttacttaagatgttatttgataatagtttaaatatatgatatttgtcctaaaaatgtttttaagttgttatgatactttctagattgtatagatttataaaccaccaagattattatttatagctcactctatgggcactttgttaatatcgtttaaaattatacaactatatccttttcttttgaatatgagtgtttgatattttcaaaattaaatgttgagcgttagttattctaacaatcattgacatttaatcaggcagtaaaagattaaaatcataattatattctatatgatgactgagtccggcatcataacattatgcgtgcattataactcgtcacatgttctaagtattttcttatttataaagatataaaaaatatatacttcaaactgataatttgtatattttgtgtaacgccccgacatttattagccattaacacagctaactcacaccggggtgttatgcattacctgtgatatagtaccagtcccaggatacactagctggtacacacagattaaatgtggaatcaaataaactgctttattacatcactgggtagtagtccttacataagttgctatcatggacagacccatagatgagcaacacaacattacagaaaaccataaaagcgacggtgcagaagcgaacagcgcggagcactaagcgactaagcaactatgcactaggcgaagaacctaggcatctatcttattccacaggcgaggcttggggctaggcacgaaacatctagaagtcttcatactcagcttgctcctggagatgctcctcggcggtcgggtcgatgtcttcatcttcatactctatatattattataaggggcaagggtaagtacttaacgtactcagcaagccaggggaaagaatgacatgtttggtttaaacaaggaggctaaggttttatttgcgaaagctgcctttttggcaaagtgatttatttcacaaaactcctagtgagagagtcaagttttagttgtcgggaggaggctcacgcctcgacccattccacaagttgctttgcaacaacttgtcacgattaacgaacaacaattaatttgttcctctattagtttcttctcacaacaacacatagtccacacagttatctcagcacaacaacgccatcatcatggccctaacaacacctcggtgtcggacgacaccccaggtcacacagacccgttcctaaccacccaggttagccgtctgccacacaggcggactctggtaacgttacccttcccagtaaccacttcttcacaaacatttgtcaaacaaatctacgctatgagaaacaccttacactcgcccttgaccgtgggcacggctgttcgaacagttcattaatctctgcagaggttgcacgctttacccacacgacacgaaactgacatcgtttacccgtcggcaacgaaagttcgtgataaggcctttccaaagctaacccatgaaaaccgcatgccacctagttgggctaagatccatagccaagtatcaggcaatgacagccgacatccactcaggaaataccgaggatgccttctactcctactggtaccacgccacaatagaggcaaaaagacacccatgatgggcaaaaatgtgtaacacttcgtctcctcatcctcggcattccacaaccattggcacaccaactcccatgtgaaaacaatttacttagccagaggcatcccataaatacctgtgtggtcgcactataacgtgtttggatggatttcccaaaggaatcgatccttaacgataatacgtagccaaaccacaaaggcatgattccgcatcatcaccactttcacaacacattttatttcacaactcctcggtacaatgtaccggaattttaaacatgtatttggaataacgcaagtttcccacacggtaacaacgtaagcatggctaagcgggaactaccttggtaatcgtgtaacgataccggcgtaaatatttgtggagctatcaaaggtatggaatcatcaacctatgaaatataagtgcgactactaggttggtccgtcggttgaataaacaatccgaggcctaacatgttaatcgtgtatactaaataatacacttttgcaaacaacatatcattgaaaatataggggcaatgtgatcaaaggggcttgccttgcacagcgttggggtcttctccttcgaaagcggcgtccggagcttcctcgaactcgggctctaaacgcgaaaaacaaaactaaataagaaaaggcaacaaaactagctcaaatcagagaaacaattgtgccactgtgtagatctcaattttagaaaaatttaggaacttgaacggggtcaatcggagttacggttgatttactatgaattttcaaagaataaaggattttctggaatgttggaaattgacttaaaaaaaggtaaagggaggggcccacctgtcggtggctgctagagaggaaaaggcgcacgggccctgctcgtcagtggcaggaaggagtaaaggaaggtggggccggcttggcagaggcttgaggaggcctgcttcttcctcctctcgctcttttgctcggctcggtctgggatagcgatgcgtctcggcgatggggcgcggcgaggcgaccggcggctgagggagggcggcggagaactccggcgaggctccaccggcgacggcggcgccgggagaatagcgcggcggctctggctggcagcaacagagagcaaaacgagagaaagagagaggagagagagatggggagagatggtgatggtgtggggagaaggagctcgggctgcttccccttttataggcaagcggcgcggtggcgagctggcggtctagacgcggagctccgggggtagctggctagcggctagggcgggattccggggtggacgagatggcgacgcgatggcttggcgtcatgcaccggtggtgactcgacggtgaaaacgacggcgacgcgacacgaagtgacgcgcggagagcgggaaaggcgacgggacatcgatgacgcgcggccgacggcggctacggccgggatttgggtggtagggttctcagatcgatgcgacgcgagcgacgtcacacggtggtggcgatggaacgcgagtgagagggaggcgcgagctcggcggcttcccgggaggagacagacgacaagacgacgggcgacagcgaagggacgcgcgtccgcgagagctcgggatggaacggcgacaagacgggggtgacgcggggcgacgtggctccgtgtctcccggagagggcgcggcggttttcgtggagtttggcgcgatgcggctttggcgcggcgtgcggggcggcgctacgtggccctggcacgttgtggggcgcacgggagggtggtatggtgcaacgcggtacgggaacgagggcggaacggtgcagcgactcgggtcggcatttcgtcgaacaccttgtgtgcatgcactggctggctcaaggaaggggacgatgagcagtaatgggctgcgctgggccggcctgctcaggggaaagaagagaggagaggtggaggagagttgggccgagagagagggaagggaaggaggcccaatatgaacagtgatatttcacattttcccagggatttatagagttgaattttgaggagaacttgaagggatttgaatttgaatttgacctagagtttcacaggaatttgaaaggcaattctaagagagtatttgagatccatttggcacaaaatcaactaagaaccaaattaactccaatttttaaatgacaagcttttttttttaaataaaagcaaataaaatacgggtgctacattttgatatgagggcacaataaagcacatttgagcaacataaccatttatttatattaaaaggttgaaactgtacctccattatttataagaaaggcagtgattaatgtaaacttattccttaaaaatctactcactactccctctgtcccatttttaagtgcagccatcattttccgtgatcaactttgaccgtccgtcttttaaaaacttaaaaaaaattaagaacataagttacatataaagtaactattcatgtcttattatctcataataataaaaatactaattataaaaaaatccaaataagatggacgatcaaaattgggcatgaaattttatggttgcacttaaaataggacgtggggagaacttatatgtcatttttttacttttaacataattgaattatttaaaattctgttgtacataagatatgtgctatgtacatatgaattttggagagggaggagtgattatgtacgggagggagtgggaggtggaagggatttgtgttttgaaggattgatttaatggttagaaataatgggtctaccgatttaaattagaatggatagctaagtatttttcttataatttctatatgattttttttcttatttattaaagttccatgtagcggtttaggagcattcagcatgatgtttaatgtacttaatttttttttgcgtgtttcttgcatggtataggtagaaaatgattttttttccttcagaattgctatgacatatttgtggaaaccaaaggataatacagtgatgaatcaataaggaattcaaattgcatactgttttttctatcctataatccgaagcttatagcttgatttttaattttaaaccctaaatgtagctttgatttatttttttgatttcagaatgaaaaaaaacagacatagagggttgtgaggccaacgtgtttacgtacttacatacggtgcttatgtgcacgtgtatttagtgatttttagcaataaaattaactgttaggttttcatgatagatctaatggcttctaacggtgtatttattttttttattttagaaagaaaaagaaaagaaaaagagggacatgaggccagctggttacgtacatacgtacgtgctgtgcttgtatgtatgcacgtgtacgtgggattgatggagataaatttaattgatcgtttttaaaaatagatctaatggttggtaacaatgggtccatcgggaataaattaaaaaaatcgacagttagatgttttgtcttcttttgatttttttagaaataattatagtgtcacgtggaggcttaggagcatttgtagggttgctatgtggcggcttaggagcgtttgtagtaagtttaatggacttttattattaaaaaaagataacataacatcaattatatacatgtaagtcccatgtgctggtgctgtggaatacaatagtatcacaaattggatataaatttaaaataatttaaaagatggaatgtttaaagagcgttgattggatattttatatttatatattataggtgtaatttaactacgtatatttgcgtaaatttgtaaattgtatgaaataacgtcgatttttctttggaacggtactacgttcttttttttctttatttttctctatcttataagtacatgcacatggtcttctttttcttgcggcaaacaattaatggtttagcttttttttttctttgtcgtacgtacggcggcaaacaatggttcagctttttttttatagtcgtacgtacgtggggaaggtatttatcctttaggcaacacttaaatatttctcctgaaggtattactttttaataacagatgcaatctaatggtctaaaatatcgggaccaccaattgaagtgaaaatcaacggtgagattagatagtgccatgtggcgatctaggagcgtttgtaggattgccacgtggcggcttaagaacgtttgtaggaagtttaatggacttttagtatataataactagcaagatagcccgcgcattcgcgtgggcatgcgcattagtttgttccaaaaatagtttgaaaaataaaaaattaaagtaatgtattttctactgttacttgagtatttattatatcgctttttctgaagaaatctcgacaaacttttattggtaataaatatatttttttaccattctgctagccctctctttaattgcttcttatatatgcaattcgttatgcatgtgaatcaataaagatagaaaaattcttttaaaaaatatttattgtattttgaatttagtgattgagtgattcttaattcgactttgtattcaaatcaaattaatttattctaatttgtctttttagggattttaaattgcacttaatctcgtattgtgttgtatttgatctcttcttttaatacttattttattattccaaattttagatatttataacttatacttttatagtgactcttgatattttatattctacatggaatcttgttatatatattttttttgtagttttagtgttttttttaatttttgtttgtgtattttaatcaaattgcttgttttgtatttttgttctgaatttaattacaaactcattgtggtgatccgactgtcaccatcagcctcacggatcattgccgacctcctcatcagtgagcctctcttgatacattggacatgacgtggcggggcttggtggcaaagatgaagctgttttctagtccttgtcgaagacatggaacgtctccttttgcgccccccccccctcccctcttagtccttgcccttcatctaatcatttagtgcgctattaggtccaggaacttgtagaagtcgatgatgccgctgccgtcagcgtccacctcgctaataatgtcttgtagctccgccttcatcgggttcaggcccagagtttgcattatggttctaagcttcttggtggtgattgaacttggactttagatccacacatttgaattcattcatcgttttcgaagtgctattttgctcaaatatttgtagtcataatagcagcattatctaacttctatatagtaaatatgggcaatatggatcttgaatttaattataattaacacaaaaaatcaaataaactgagaaaagtacatgtaacttgagagtcatgatcatttagctattattatttttctatatattatgtgttaggtagaaaataggaaaagttatcttaaaaataggatatgagaattggatcccagagatgagtaggatggtggaggtacgtacgtacgtgcaagcatgctcacatacggtaggggtggaggtgggggtaccggatttatttttgtgagatgtagcagttataattattgggtctacctatttaaaggaaaatctatggtttaatttttttttttcataatttctaggaacttttaatttatttgagcactacatggcgtcttatgagtgtttgtagaaaatcatgtgacagtttaagaggatttgtagggagtttaatgaatttttagtatataatagataattaatatagcattttttggttctttatgtactgaactgctcgctagaaaatatggataagaaagtgagcaggagagataataggagatcatttacgatggcacaatatatattactttttgtaatattttattactatttagttgcgataaaggggtttatgtcaaatgatatgtttcttatatatatacatgccaaaatatggtaaacatagttcaaattaaaatcgaatatgttataagatattctaattatttagttgttgtgttttttatatataaaattttgctaccataaatggaaggaagaagagaggggtggagagacatacgtactttggatgtacatacgtgttaggagaggagggacctagggagaggtgtggacgtgcgtgacatttgttttttacatatatagatctaatggtgtataaagagaaaatcaatggtacgatgttttcctttttttttggaattttttagatttctctaatttatcatagcgccacgtggcggcttagtagcgtttgtaggagccacatggcggcttaagagcgtctctaagaagtttaatgaacttaagatgtctatttgtagatatttttttcataaagatagaaaaagaagaaagaaacaaagagaaaaaaaaacgaagggaagatagggagcgtacaataagtgcaggaggtagggacagcagaagtttttttttctttaaagataatctaacgatttaaaataatggacccacctatttaagtgaaaatcgatggttagatttctctattttattaaagtgacacatggcgactcatgagtatttttaggataccacgtggcggcttgagagtgtttgtaggaagtttaatggacttttagtatataatagatagatagataatagatagatagatgtgtcgacatacattatgtggggattaacacccacagattaacatcagcattgtcagccatacaaaatacgaagcaaagcgaacggcacatcaaacacaaatacatataatctctaaaacagatcaggatacatagataagattagaaatgacatgagtggatgcaaatactgttcaggcgatgaattgaagatctggtgatcaaggcacatgtataactttgattgcagtagtagtgtcacgcatagcgggcgtagatggtttgtgatctcggtcatcatctgaggtgttggcctggtagtcatcggaacggccaggaaatccctcgccatccttgctactatcggatacctgtgacagttctccttccaccatttgagaatgtcgaaattctcttgcttgattggaacggtcttttctcgcaggtaagcatcaagttctgttctcctgtgatcatgctccatactggattgaccaacagtttggaaagtactgttatcaatttgctggaatggatcgatgtccattacattttcattgttatgattggtgtgctgccttgcactgccctgattactgtagtcctgaaagagctgaacgactgctgcttgaacctccgaaatgcgatctggaggtagggaagctttctttagaaggcgttcagcgttgacgagcttgaatcttgggtctagaataagcgatatgctttgtgataaatatgaatcctcaaaaaacttgtccatatattcttttgtttgttcaagatgggattgcatatcatagtcctcgatatcaggagcttgttcttcgtcaatatcttcatcatcactatcatctttcctagatgcattgatccattctgaatctttcttttcagcttcacaagctctataagggataggtttgatgttggagagctggagtcagcaaatgttttgatagcattgtatattacacataatgttgtgcgaaacagctcggtagtatctgtttcctggaatgtgtcatctactaaaccggcaatttctgctgtagaagaagagcgttcgtcgtgaagaaactgtagggcataatacaacgcataccaccagtcgtcgtatgtccacgggtgattcagccttagacgtgaagaaatatctctgcgtttcttcttagtccaacataattctgcaaaggcgagaaggcaatgctttccataatgacgatctaaataatcatattgtagttgctgagcaactctatagagcttccaatgcatgtcggtagcacgtaacaactttcgttgggttgcagagaggtgattaagatgattgtccttgtccaatttattttttaatatgttccaaaaatattcacttaatatagcgccagcaagcttaggcaaaataccataggaagaaatagttcccaccacttcatcacaatcatgccgccagacggaagagtaatctttgacgtccaatatgtgatcatagctaggttcgtcgtgctgatcatccttaaacacccgtattactcgcctacagagattccattcatcatcaatgaagtgggccacaaggaacacagtatctaccatggcagttcgagcttcgccttgtgacaaacttaccagcccaggcgtacgtgcaatagcatcctttaagctgcacgtttcttggtcgaagagcgcatcacacctctcctccacatcatctcgcgaaggcatcttgaaatcagggcagagcattccaacaaatcttatgaactgctcgtcttccaccatcgaggaagggaacccgtgcagtgcgatcatcctgatgagctgatcttcagcagcagcagcagcagcagccgcggtttgctcaccgaaattatcagagctcgatctcgagaaagccggcgcatcctgcaaatcgtgaatccccgcttgcacagatgcaccatgagagccctgctgcctggcacgcttccttgccgggcaggtatcctggtagtgcctgttgagacgcgaggtgccattcttgaagctgagctgcttcttgcagtgcctgcactctgccttctgcccagccttctcctgaaagtgatcccaacaatttgaccacttgctatggtctgcggcattagtaggttgatggttgttctccgccatcgtaatctctgttactgcaacaggaaacttggatcctaaggaacgggaagttcaaattgctaccgatcgtaatccccaggttcataagcagtaatttcacatgaaaaaatcaattcattcatacatgattcaggaaaacctcaaataatgttttcccctcttttcgatgggttagacccgcccaactgagcgaggacagcaaaatgagccagctagatacaaaaccacattagcactaaacacatcacacatcggagaagaaattaacatggaaggaggaaaagaaggtagagagctggaagattgggagaacttacgagctagtggttgatgctggatgggcacttgggcagccgcagatatcgatccgcagcgtttgtgttccaaaaaatgggagggacacaaaaacgcagggcctatttggttctctaccaaaatctaggcaaattttggcactaccaattttttggtagagcaaagttagctaatctatgtttggtttaataccaatataaagccaaaatttagtatgagagtgaagaagattctagaatgtagccaaattgagcgtgggcactaccaattatttggtttcaatccaaactagcatgtttactattaaagttaccaaaattttggtagggtcacgttttggcttcaatacaaaacgacccgcaatcacccaatcccgtacgaaatcagagcgtgtcaacgcctatagcccgagctttgagactgagcccaagcctgatggtttgaccagttgagcagcaactagcacagcaactactgcatcgacacgattaccaagatttaaaatagaaaagaaaaaaaatctggtgtcaccctgaccagcttggcaagctatggctgtgttttggatctaaaacttcagtccttttccatcacatcaacatgtcatacacatacaacttttcagtcacatcatctccaatttcaaccaaaatccaaactttgcgctgaactaaacacagcctaaagcacatgttggtattccagaaacggcagcaacaagtaaaaccagcaccgcagctataaaaatcgacgaaaaaaataccaaggaaaaaaaatccaaatacccaccccatccactttagatggaagtttatttgccaaaaactttaaaattcgacatccaactctctaaacttcgcaataccaatattacccataaagtgtttttgcgtatttaggatcttaaacaatcggctctaaataaaagggatttactatacaataacctgctgagattttttgttttatcaaccgaattcctagccaagattcatgcatgcgttaccaggcccacagcttcatttgggtttggacccattttgttttagatccgaacggatggagtgggcaagtaggcgatgctttccggatccgtttttcacatcgtccattcctagagtcgctccccctcctccactctctcttgagctctccgcctccacctcggattgggatagcaacagtaactttgtgatattctcagccgtccgatctatagtgtatggatgagattaatcgctatagtgcactatagtaccctcattaacagtacctcacgcctgtcaccgtgtcgccatcgctctcccccggcctccccgacagcagattcggccggccgaagggaaggaagatccactagagggtaccattcgagtctccgttgtgcgctctcttctttttatcctcttcgtctcaccacccctcccccctctccctccttctccactctgtcctaggcctccctgccggcggatctggccagctagagggaaggatacgagtcggcgccatgcgctctcttctcctccctctcttcggcgacaccctgccccctcctacttcctctctaatctatcagcggcctccccagcggcggatcaggctgtctagaggagaggaagatccgccaaataggaggatgcgattcagctactagtacatcttttgatattttggatgggtatgttctatcagtaagacaactatttccttttgcgtttctacaagaatagttaaatacatcttttaattactgctctttcctaattaaacactatagggtgagcaatacgttcatgacttcatggcatcatagatatgatacacagagaagcagatggagatgatagccttaaggttatgtggtagaattggttcaggtcatttatctggatctcctttattgattttcctaattcgtgtttaactacttgtctcagttttctgtatatcactgtctattgtaactggagtatctatttgtgtatctctgttattggttgcatgttttacagtaaaacttacaaaattagcatttttttttattcgtcactagttttgtcatctcttaacattacctatttttcttagtatttgaattttgtttggtaagtgcaattagcaaattaattttgttagctaatacctagttttgtcaccttagttttgtaactagcgtgttccttgcagtgattagatgctctgaatttgatccatgcgtgtctataattttaactatcttcaattacgttacacgttctcagaggctacctatgcccctgagaggagaatatatatagagcgccatgcatagaagtcttttaagatcaaatgtaaaatatgttatgggaggaataaaatcatatcaacaacccacacaagcatacatagatgcgacgtgaagggcacatcaaagactccatacatttaagctctaaaacaaaatggattacaaaatattaggacatgacatgaggggatacatatactattcaggtgaaaaaaaaaaagagctgccgacgaagctgcactacatatccaagaagtattgtcacgcgtagcggcgaaaatggcttgtgatctcggccatcagctgaggagatggtctaccagaagttggaatggctagaaaatctcttgcaatcctggctaccgtgggatacctgccacagttgttcttccaccacttgagaatatcgaaatccacttgatccagagggacggtttcatcttgcagataggcttcgagttctctcatgtgttcctgtgaactcgtattgccctgctctgtgagttgcaaagtactcccattcccttgtattgatggatccacatccatttcatggatatgattagcatgctctgtggcattgctctcattattgtaatctgtttcaatgccttgtgttttgtactctgtgaagagctcacgaaatttttctcctaccttagaaactagatctacagagggagcattcttaagaatgctctgaaaattcttgagtaagttttcaacatagacgagcttatatctcggatctagaataagtggtatgcttagtaacaaatatgactttaacagaaagcggtcaagtgtgctcattgcgttctgaacagatattaaaagaacatgttcatccttgaaacaatcagttagttcaccactggaattttgcatccttcctgaacaattgttgaatccgagtactaacgtgtttctcacttccagcatctctatgaggaccaaatttgaagtaggcaagctggaggttgacatcgttttgatggcatggtatatccttcctagcgtagtgcgtaacacttctgtaatccatgtctcatggaacatgactttgcctgctaaggctctaatttttgctggtccggaagagcattccttgtgaataatttgtagcgcataataatgtgcataccaccactcgtcgtatgtccaagggtgatctagctgcaaatgcgaagaaatttctctgcgtttcttcttcaaattttcatcttcaaaggcgtcgaggcaatcttgtccgtaacaactgaatggatgtagattcgaagcaatatcaggtaaatcccaccgtaaattggtagcacagagcagctcatgttgggttgcagatagatgtggtagatcattatcatcgtaaattatttttccaaattttgtcgtaccaaaattttctattagaacgccactaagcttagacaaaaggccccaatgagaaataattcccaacatacgctcatagtcctccggctcccaatctgtaactgggatgtctatgatgtaatctttgatatccaatatcttactgagaccataggtggtgtcatcttccacttctaatgccttaaacacctgtataactctgcaatggaaattccactcttcatcaatgaagtgggcagccaaatacgcaactttcccccaggcagttgtggtttttcctaatgataagctagcaagcccaggcgtacgcccaatagcatccttcaagctgctcatttctcggtcgaagagctcatcgcacctcttccggacatcgtctcgcgacggcatcttgaagtcagggcagagcatccgaacaaatcttgtgaactccacgtcttccaccatggaggaagggaacccgtgcagcgcgatcatcctgatgagctgatcttcagcagcagcagcagccgctgtttgctcacccaaatcatcagagctcgatcttgagaacgccgatgcaccatgatgagagccctgctgcctgccacgcttccggcaggattcctggtagtgcctgttgagacgcgaggtgccattcttgtagctgagcaagttatggcagtgcctgcactctgccatgttgtcagccttcttctcaaagtgagcccaacactctgaccccatgcccactgcacaacagagaacactttgatccaaaggaggaatgggaagttgctaccaatcataagcaaaagaagacgatatcatatgaaaaatcaatcagttcccgaatgattcagtaaaataaaaaaactcaaaaggttaacatagaacagatgcatatgtatggatgcctgaaaagattttgtttcaaatttcccccttccagccgggttagagttaagagttaaaccaatctaagaacaagaagagatccgctagccaaaaccaaattaacctatcaaaagtagaataagagttaacatagaacagatgcctgaaaagattttgtttcaaaatttccccttccagttggattagagttaagagttaaaagcacctaagaaatccgctagctaaaaccaaattacagtttaccggtacacaacacacctgcggagaaacaaaggaacgaaagagagaggtagccgatctgggagaacttacctgatgagaaggctgatcgatggagggatgctccctgccactttcctgagcctctctctcgatcgatccggctgctgcctgctgctgttgctcggctgcttcttctccaacttcttcgcctagtaggagtatacgaagagagcgagacggtcaaaatggaagggacccacccaaccaggagcgtgtccacatcttggggactgggcggccacagcccacccctgagcccgaagcctgagcctgagcctgagcccgagcccgatatttgtcctgtgttcacacttgttgacaaggaaccggctcaaccgacgggttaattaagggttggcgagaaaaaaaaccactgtatatcacgtcggatataaggatatatatttaaattattaaacatagtttaatatcaaaataagttacagattctactaggaacctacgagacgaatttatacctaattaatccgttattaataaatatttactgaatcatggcgtaattaagcttaaaagattcgtcttgtaatttacgtgcaaactacgtaattaattttttctacatttaatactttatgtatgtgtctaagtattcaatatgacagtgcgaaaaattttatttggaaaccgccctaagcaagaacagaaacgtgacacacgctgacctgcctgaccatcaaaaccacaggtttggtaggagacttgcgttcgagcgcaggaaaagattgtttcgttttccacccgcacgcttcccgaactattaaatggtgtgatttttgtaaaaaaattatataggaaagttactttaaaaaatcatattaatctatttttaaagtttaaaatagttaatactcaattaattatgtgctaatggctcactttattttacgtatcttctcaatctccccaatccccttcttctcaaacacacctattaattcccggtaacgagtaaaatcagctagcaccgcagctataaaaagttgaaggaaacaaaaatcggatttggtagaaaactttcacaagtttttttttccagaaactctcatatttgtaaccatcgaatcgtctcgagatttgtgcataaaagaaaaatattactataaagaaatttttacacatgtcacgagcaaaatcctagtgctagctacccaaactatagttggatgcaagttttatataagctatatgatagttcaagtatagtcagttacagcgcggttacagtatagttacactataattatattttaattatattataggtacatctgaaagtttctaactcaaacaacttgcggcagcggcagtttcttagataaaaaaaaatacaaacaacaaattgtcattgcccggatatggacaattcaacggaaatcaatcggaaatcctctttggcgatcgattgccctggcgatgtaccagcgatcagttccccctccctccacctggtttccttttttgcaccgcattaatttcctattttagtaaatttatgcacctaaagtttatacaccttaagtttacacatctaaagtttagagaccaaaagtttatatatccgatttaaatttgaatttaaattcaaatatttttatatatagtatttctatacatctaaagtttatagaactaaagtttatagatctaaagtttataagtcaaaagtttatatacccgtttcaaatttgaatttgaattatatctgatttaaatttgaatttgaattcaaatattttattcaaatttgaattttaattcaaatatttttttatatatagtatttctatatatctaaagtttatagacctaaagtttataagtttatagatctaaagtttatagacctaaagtttataagtcaaaagtttatatacccgtttcaaatttgaattttaattatatctgatttaaatttgaatttgaattcaaatattttctatatatagtatttctatacatctaaagtttatagatccaaagtttataagtcaaaagtttacatacccgattcaaatttgaatttgaattcaaattttttatatataatatttcttgacataaatttgtttaacttttgtttttttaaaataattttgtggtgtactgtagtagggaggaggaagggggagaaagggacgtataggaggaggggggtgcgggatcgctcccagcaatcacccgcgcattagcagcccccgaaatcaatgcctcgggtgatcaaaacaatctgcacacgttacaaaccgtacgaagaggaacgaagtgacgaaccacactctcctcctttcctcagtcgctccccgtctcgggtgattaaaccttgtttgaataatttaacaggatttcgctcaattctctcattggaataaattaattaattagggacaattttgtttttccccactttgatctctaatattgattttgcccatactttttagggtttcgttttttcctctactttttttaaccgaaagatacttttgcccccgttttgtttggatggaggagttaacggtgttaaataggacatttatgccatcttccatatctattcattaattgtgtttttgcccccattatgcaatggctttggaaatttatttttttatatgtttaaaattaaatgatagattttgacattacaatttggacaaaatttgaatttgatggaattttgacaaaatttcggcagtattttgatagaaattgaacacaaatttggacgaaatttcaacaacattttacacaatcaaagccaccaatagctcatgtcacaaggccgacgccagccgcgtccaagccccctgctgttcggcgccgcccaaccacctcaacgccgccgcctacccctctccccgccgccgcctagcgcgccgcttggccaccgctcactcgccgctgctgcttgcccgcctcgctgccctctccccaccgtcgtctccccgccgcctagggcagtgctgggctcggatacgcaggaaggagcggcgcccggctgacgcccgctctcctccgccggatagggagatctaggtctcgggtttgaatcacactagaggagaggagacaaagtctgtatgacccttaactcttttacacgggtaaaaagataaatcactaattcgaaaaatctttatttcctgccataaacccggtcccactaacttccattcaaaccagtggtaaacgcctctttcgattcaaaaagtggaggcaaaaatgaaaacctaaaaaatagggacaaaatcaatattaaagatcaaagtgggggaaaaagggaattgtcccaattaattaagatcgaattcatctcccaaaatgaaaactttacattcttttcccaaacaaaaacttcatattaccctaaggcctaagcagatcatggaggcctagtttttctatttctcatgggccatccaatacggccttttcagcccaagcacaatctgagccagaataagttcacttaggtccctcaatatcgctaagtttggcattcgcccttcaaccgcaatatcagatatgacacatccctcaacacccaaaaccagtagttccaaggtggtttgaataatgatttcagctgacgtggcacttaaaatcagaaaaaccatgggatccatatgtcaatgagccgagatagaagatggctttgcctacctccgcagtaaccaaagtaggccctcctcacgtaggccacagtcaggaattgctttagcgccgcccaccgcaatgcctcggctcgtcctccttctccctccaggcttccacaacacaacccgtcacttgcccttctccccgccaccctaggccagctaccggatgccgagaaggacaagaagcaagaacagaaaaaaagaaagaaaaggaaaagaaaagaaaagaaaaaggtgaccaagtgtaatttttttatttttataactggaaactcactaatatgagggtcctatttttttctaactttcattgtcacgttaacaggaggtgccacgtcatctgaaaccaccctggtatcttatttgcactgactttgaaagttgagggacacttctagcctatttggtagagctctaactcctaaatttagttccatgagttgggtctggagtagagttgtggagctacctaaacccagcttcacctttctagttcattttgtgagagagcttcatccagctccgctcctaatttaggtggagctgaaactgtttggctgagctctagctccaggagaggtggagctgaagctgaagccaggggcagatctaccatgggggctatggggtctcgtgcccctactaccggcgttacaaccataaaacccccatgaagtccccactgcaatttgagagaatctattctataccactgagtttatcatagttcaacaatttaccattgactttgtctctttctacaatataccggtgactttatcaattgttctacaatatgtcattgcgttgagcctatttttcaataatacctaaaatacccttatgtacgtataaggttaacaattgatttatattattataagttttaaaaaaaatgaaaacttttatatggcctctttacacagtataaaagtttgtatataagtttcatttttcttgcatttctatttttttaatataacttatttgttatatgctatataaaatatttttgtgttgttatttttaatgtgaattatctttcatatgcaacataagatattttttgctattatcttttgtgtaatctatttttctctgatataccacacaaaaatatttttttctaaaaaataaaaataccaaaaaaaattgaaagttatgtacatacttctctgttgtgtaaggaggccatattaaaaattcatatttttctgaaactttttaatgagataaattaattgttaatcatatatgtctgtaagggtattttgggtatttttttaaaagaggctccatcccaatggcatattgtagaacaattcataaagttatcggtatattgtagaaagagagaatgtcagtggcaaatcattgaactgagataagcacagtggcatataatagattctcttaagaaggataattgcgattgaagtggtagatctaatcaacctgacaaatcaacacacaactattgcgggttcttaattattgcgggttcttgctgggtgttgaagaattttccatcacaatacggttctacaaataatgcggtgagagcttgcagaagcctccataatggataaaaggtaaccaaaaaagtttatggtgagatgcaaaagacaataaaaacaatatagcaaatatcacaagttgataacatatatatctctataataatatagtggtatgtttgggcctgaacacacacatactaaaacatacacagtccaaccctttcgtttttcttctgctatatttgatcaatgctttcagatcaagccatgtgtattctcatgcactagtattgtttgaatggcgatgaacatccttgcagtatcattgatcagtttccctttaatcttcttcttttacatcggtttaatttgttccattttatgttattgtaggtaatgttttaacattagggattttatgttattgtaggtaatgttttaaccggtatcgctatggccattttttgtttgatgaggtatggttattaggttatcacacgccagatttttccagaaaaagtcgtggcttgcaatcttgtagcctctatcacttgaaccatctatatgaggtccaaatgtatgtcgggggaaattacgctggaatgatgttttattaatcaattcaatgaataccacaagtagcatgtttattctacttctttattttctaaaagggagtgatgatagcaaggtgaaatgaatgaagtcgatatgcttttaacttgttgcttatttttcaatcgatataatcacaattatattttttttcatttatacagtattggatcctcatgatctcttcagtagtagtgtgctgtgggatgggatggctagtgtggcatcctaatgtcaatgtcagagagaatcaaatattttttaaagaagctcaccaaacaaatatttattagaagcccatctaacaaacatttgttagaagcccacccaacaaacattttgttattagaatagttttgtttgggttgataaaattcatgtccttttttgattagtaacaaatgtctaatttactatcttatcatggaatatattgttccacctacatttagttttttaggtagagtaaaggatagcgaataaaaagttttttagaagaaaatagtaagtaaacatatgcatgtgcagaataagttcagtgaaaccaatctaagtatggtatgtccttcaggttatctaagtttgaattgcacgtctttaaatatcatctcatatttattttatcatgtatatccaagtctttagactttcactgcattatctacttcattgttcctaacaaataacatcattcagttatgtaactagtctgggtactatagcgagattttcttatttctattgtagaaaaaaatgatttaaatatcatgaaaaacttgtttattttattaactaatacccctttcttttctaattttagtgggacatgagcagttgtgaaagtagacacttcactatgtggatttaacaccggcataagtgtttgttttattataattgttgcgttttttaaaagttaaaagatatatatattattttcctatttgttttatcatgtaagaaaaaaataaatatatttagaaaatagttatcaggattatattgtttaattcaatcttaaaaagaaggagcaaactatttttgtcatttagtttctctatctattattttaagttttttaaaaacataggatatgtgatcatgatacttgctccgaaaaatttataaagaattttacaataagttttttttttcgtctttttattttttttttcttttccccctcttttatgtgtttgcactagtccgatcacgcactgttggggttgtggtgccgtgtggcccagctacgcacatcgagcggctcttcttctctctttttttaaatagaattcaccatcgtaacttgtgcgcttgccatttatatatatagagtgggtttcttacccagcgctcttttcgtcgctggtatctcgccatgtgtcactcaactaatggacggtgagggtagccaatcagttagcacgaaaccaaccatcatgagatagatagatagatagatagatggaggaaagatattttgggaagcctctagaatctggatgttgtgccttttgtttgttttttcgtatttctttttttatggatattctagatttatcttaaagaggatagatagttgggaagtctgtaggattcgtgtcttttcttttcttttggatatttttatgcataattttcttagatttatctcaaaatttaacaccgccatgtggcctaatgagatgcctcgagacgagccagctttagaaggatagatagattttagtatatactttctttctaatgtacatcatttcaaatagctaattcgctggcagctgcgatgaccctcatacaaattgtatggctgttgagtcggcacaatagtcatcaaggagtagttggacagattgtagatgttggagagcttgtgatcagtgttactcagtgtagcaagatctttggagaggttgggagcagcaactcctaccgaggagttcttaatacaaaccaagtagatatctgttgaggttacaagaaggcatttccatttgaaagttcaagtgctattaatttggttttgatgattaatgacaaatccaattatgtaagactaatatttttataagcatttctttgcctagtctcgtgtagatatgaaagtggagtgttggtggatataaatcacaaggatgaaatgcatggagatcaagctgcatgtattactttttctctccatgtacatattgatatgttcatatataatattttcatgtgaataacaatatacatgtgagactaatgttttatttgagtcttttctcttgtttagtctctttacattgagaacatgaagatgatgaaggtatacatttattttaatgcattctattcttgtatatgataagctcctaatgtttcattctttttatgcatactcttgattcacacaaacattttgtatgcatacatctagggggagcaaatcatatactttagttatgtggcctctttacacagtgtaaaagtttgtatataagtttcaatttttttgcatttctatttttttaaaatataacttatttgttatatgctatataaaatatttgtgtgctgttgttttttatgtgaattatctttcatatgcaacataagatatttttttactattatcttttgtgtaagctatttctctctgatataccacgcaaaaaaaattttgttctaaaaaacaaaaataccaaaagaaaattgaaacttatgtacatacttctccgttgtttaaggatgccatataaaaaaaatcatattttttgaaactttctaatgagataaattaattgttgatcatatatgtctctaagggtattttgggttttttttaaagaagcacatctcaatggcatattgtggaataatttgttgacaactttttgtgaaagagagaatgttggtggcaatcattgaacggagataagctcaatggtacagaataaattctctcctaaaattttatgccatacattcattagaagagtgggttatagttttgtacggtttgttccgcccctcgcccccctcctattacttcctgctagatccgcccctgactagagctgtgccaaacaggcccttcatatctggtattacggttgagggacgaatgccagactcggcgacaaatttgaacgaccagaagtgaacttattccatctcagcctagcctgagtagaatctaattggcccgacaacatccaagactggacacaccaccgttcagcagttaatccgggccgcacggcctcatcgaacggatggtacacccaaaagggaaaccatggaacgccgccgccgtttcacgctgtgcctcgccggagcgccgccgcaccatggacgtaaggtgggcagcatcgtcctcctccttgcctatctggtggtgtgcatgcccatgctctgctgctgcatgctgccgcctgcccatgaagctcgtgtcatagccggccggccgccagggccggcgcctatgcagccgaggcgatcgtcaggggcccataatggtgggggccaacacttaatactagttgagttgtctagtagtacttgcttacggtctatctggaagtagaaatgtccgagatacgaagtaaaattagcatatcgcgatgaaattttataagtaaacggtcatgtatttgttttcgttttacaagtaaaattagcgtctacatatatcataaaattttatatatagcttagaaggcccaccacaataagtttatctaggatcctcaaaatcataggaccggccctgccggcggccgccatagcacgacgcgtgcagcagggtgacagccgccacccccgccagcgccgccggcgagcggtggtcggcggccggcggccggtcggaacatgagtatcaacggcggacacagcctcatgaaaaattacataatttctcatgaggtcaccgtaactacggtccagtttaggccagctctaattaattacagcagctagcttcatggattattcgagatttcatcacatgcacagaatgatctttgtctagttagatcgacgatatatcgaatttggtccaaaaggctaagctagtgcagcacatgtgaggaagggcccccttctccaaagaaactcgtttgcgttaatttcaagtattactacttttgctttctcagctggctgaacaggaaaaaaaacaaaaacaaaagctcactatgcttcttctgcactggaatagtaggaactttgcaacttggtttcttctgccacgaaactaccccaactgatgcgacctggcttttctagtcatttgtcaaactgaactagtgaacctgtctgtgttgcaccaaacatgaattaattaaagcttcggttgaagttaattaattagtagtaactactaagaccatcctcaacccaataactagaatgatatccataacaattaaataagctgtcacctaaaatgaaaaatgatgtggcaagtaaatagatgagaaaagagaaggaaaccaggtcttacatgagacatggtttctacacaacatccaatacattatgtgagataagtaacatcaaatttaagtatgaaagagtgatgtttgtattgaaataatagtgtctatgatgttgagtttatgaaaactaagtgtagtgtcttgtattgggactgatctaattgcctgctaattcagtccgactgcttagtcaaggtgctgaccaaagctgcccctgtcaaacagtcagattagttagtctttcgacgctgagacttaattaatcctggtgattaattaattagtcggctgcatgaatcaactcgaggttaattacatgcctgcacgaagtccacatcgaaatttcgccttcaattatttgacggagctggccttgctactctgtcggtgaagaacaggcagtaagtagaaacttctttaactgttttcagactttttcattggtgcagttagaaaaagctcactcttgtgatttgacagtatttttagttaggatggtagaacttaacgttgtaaagttctaccaccctaactttagaacttaggtctggtttagttcccaacttttttctttaaacttttaacttttctatcacatcaaaacttttctacacatataaacttccaattttttcgtcacatcgttttaatttcaattaaacttttaattttggtgtgaactaaatataccctaagaaagaaaagcactgacaaaagcgagcaaatgggcttctttctttgtgccaaatagtggtgaaaaaaaagaaaagttcatggaagctgggagcagagtagcaaaaacagagttggagatgacacaacagtagcagcaaaagaactccagaattaattaggcaagaggaaaaaaaaattacaaaagagagttgcaattagcagagagctagaattatcaaagaagaagaactagaaagagcatacaagtaataaagtatacaagactacaagagtatttctactacttctcagagatagtacactgtatatacaaaaatgaaaaaaaaagttaagcaaagattaactcaaaagcagcaaggagccgacctagattaattacccctagctacaactccaagtagtaactcataactctagccattaggacaagagttaaatttatccttccctgatcatcccattcatgattcatccatggcaagcaaagacggccatgcactgctaacaagaaaaattaccgtgctctaaacgtaattagcaaggtaattaacgtaattaacaaggctctagctctttgacacactggcgatcagttcagtagtcgaagctgaaggagctcatctcggggccctcgacgatgctctccaggctgggccgccagcacccgtcggcgccgtcgcctcctccggcgccggcggcgcaggcggcgcaggcgtcaccggcggcggcggcggtggtgaggaggccgcggttgcgcttgcgggccatctcctggagcacgtcctcgaggcggcggtcgccggccttgagctgcgccatgagccactccagctcggctttcgtcagcaccatcttcaccttcatcaccgacgacgacgacgacgaccctgcagcctcgtcttcctcctccccaccaccaccgccgccgcagactctcctcctcatgctcatcttcccgtctcccaacgccgccgcgccgccgccgccgctctgcaggcagttgcccatggctgatggtcaccgccggcggcgagcagatcgagctcgatcacgtggtcgatcgagctttgctgggttggtgaatgagaaggcgagggagtgaggtggtggaggagtatatatttaacgaacagaagaagtagggtagcgagtgtgtggtgagctccaatggcgaaggagatggcaatcacacaaattttgacaatttaaccctttgaaaaaactaatattacaaatgaaccgtcgccaaaacttatttcaaaaataaccttttgttcagcgcaaaatcgtatagcgctgaacttagacacctcagcgccacgtcaactggcgctgaatgtcgtgccaccgtgaataggaggctgagtcagcgtgccaatgtacattcagcgtcgtgctatttagcgctgaggtgtctaagtttagtgccatatgatttggcgctgaacaaaatggtaattttttaaataagttttgatgacagttcatttgtaaaattagtttttgtaaagggtcgtattgtcaaaatttgtgtggcaatcaagcggtaataaatccgaaagagtcgctgtctaggggcacatggtgggggactggcgacgatggatgggttgctttgggttggtttggtgcatctcgatcactgatcacgtacctctggaatttttcaatttttggtctttttcaaaaatttgttttataaatatatttatgaaagaacttattttagaaatagatactttcgttgatgccgtgatctaacatgacaacgtagcttgagtttagcttcctttgttgctctgctactgctgcctagctagctacttcctctattttttaatatatgacatcgttgatgtttttaagatacatttaatcattcgttttataaaaaatttatgtaattattatttattttcttatgacttgatttatcgtcaaatattctttaaacatgatttaattttttttatatttacataaaaattttaaataagacgaatggtccaacattttataaaaaaatcaatgaagttgtacattaaaaaaatgggggtagtatatatgttgtggatgtgctcattgtaaaagtaaaaaaccgatcgagttgcactcacgggatgtatagtggtggttgctagcatttctacgaaaatcgtgtgaaaatcatgattctttttggagatttccgcggtagtgagtgagaaggaataagaatttttccttctggtttttccggatcgaaattagttccaatcatattttaaggtacacttgtcacatgagatatcacagacaactaatgacatgtgtgtacacgcatgattccaaaagcaacgcacgaaaaagaacattcacaagatacaaaaccgggacgcatcctcctctgcgcaaacaacattccaaaaacaacacagagacgcatcaaatcagtaccaccagcaacacctatctactcccttcgtctttaaaaaaataaattaaatatgaaatataacgcattctaatacaataaatgcaaacggtacagatttgaaatactacaatgcgtcatattttatatagtaggtttgtttttatgaaacgagggaagcacctactacgtacgcaccaactttttttagacgaatgccgctgcacgtgatctcgcaaccatccatcatcgatcgatcgatcattcatgcatgcacaccaactcgatcgatctctgcaaaatctctcgcagtcgatccaccggcacgtacgatcgtcgagcacaaagaagattccattattcccattcgtgtgtatgtacgtatatgtgttgattttgctaaagttctctatctagataaataatataggttcatatatgcgaccttaaattaaagctgagctggatcgatgcctacgtacgtacgtacctgttctgaaaaaggaagacagctagcacaacgtcgacgtgaaataaaacactgtaagtagtatggagtacttcctctttctttaaaatgtaagtattttttttaaaagttagacgtacatattaaaaaattaagtgagaatagttagaagaatattgtgattggttgagaaaaaacagttgaaataaatttattttgaaacagagggagtatatatgtacttatctcgtgtatacattgggctattttagttctttacaccctgtcaaaatattagtagtgtcaaaataattaggtaaattgtgttgcaaataaaagagttttggcactattaataatttagtaaaataattaagtatcacattgatttggtaaaaaaatggctccaaccaaaactctaggcaaatactatattaaagttgcatgatagtaattgattcttagggcatattttagtacgtaacaacccaaaatggttgttctaaaaaaaacacacaaaatggcgctatgtgcatgtttccacatgtggtgccctgcagcgatagatctcaaatacgcatgtatattagattttgattcagaaggtttatatactccaaataatattgatttcatgatgcccgggccttcgatttgaaaataaatcaattcaactttttaaaaaaagttccaacttaaaggtataagcctaagtgtaatttttttattgatacccatatcttataacaaagcaactcaaattcatattatttattttactatcccaaataatcacatgcctagctatttatatgtttctatggcatatgcctagctagaaacaaaatttaagaaaaaaatgcatatataagttcgaattcagttcaaaattgtttgaactaattataaacaagttaatattcatacaaaaagtctcaaaagttttgtactcgtctaaatcaagtgtatacccgatttaaatatttgaatcccaaccatgagtccctttacaattaaaaattggattcatgtaattacataattgacaaaaacaacatatacatatataaacaatatttggtaacaataaatctaaaataggtacatgttatgtttagatttaccaacagattttgggtgttcgcatagagctatcacatgtcaataatatcacaaattagtcatttcttaaaagtaagactacagaaatgtatgcatgtgcgatacttttttcaaaggctaatttcattgtcacattaaagatgtcttatgattcgtttttatatctaaataaagcattaaatttctcattagtacatattcatgattcctaattagttaagaaatttaatacgcaaagaattatagtggagtccatctatatctaacttcaatattaattaggcactttcagaaaatttctatattaactagaaaaatcaaatcgccaattatgtgaatcatattatcatagccgcaacaaacaatacaacggctcttgattcaattaatttagttcatgttgaaatagtagtttcattatgacaaactagtatgttttcccacgcaattttgtgcaaatcttgattttaaaaggtaggttggatctgatataactcttatctcatttttctatatagatgtaattatattatttatatacatgttataaaagtagaactgaattcggtgacatcttttagcttttgttcttgatgaatagatacaattgtattatgtacacaaccatttctataccgctacaatctaccgtaatctaactgccaaaaccttttctcttatgtagtttcgagccatccaaatttctttccgaattggtgccttttttagctatcttaattatatatagattatttcgaaatagcaaattaaaacaactgtaaaatcccacaagaaaccttgtttgcatgccctgattaatttacttggtggatgaaagaatcatggtgaggtgatgaaaactacttttccttccttaaatatagcaacttagcaaatgatagtatacatattctaatactataaatttggatatatctatcgagattcgtgttaagatacatctcgtctcacactagctaggttcctatattttaaaatgaaaggagtatatcataatcacacgcaaaaacagttttacatatactgtactacaagactagcttagaaccaactgattagacattagagcctgaaacgatgtgtggctagagacgtgcgacgactaaagatgacgaaaaagccaagccatagactcgatccttcactcaggtccttggattaggagctgcaaacaaatatactagcttttctagtgctttaattaatatgtggatgtagtgtagagtggccctttcgtttttgttaggggtgtcaaagcagaaaatgaagttattatccgatttattttattatcagagtatttggtatgattggatatggtcaagaattttcattcgtacgacagcctcacatatatatttacagaaaaaatattgatatatatagatgtggtacacacgtacttttccgaacaaattgttatattttttttaatgcaggacatgaatttaagaagctttttaatccgattacacaagaagaactattactggtatacgttactacgtaccctaaaaaacttactggtatatgttgagaaaatactactctctccagtttttaatgtttgacgttgttaactttataagttaattgggtatatatatgttagactattcatcttattaaaaaaatatgttttatcatttattttattgcattttatttcataactgaaagtataagaatgatttatattttgtatatttgcacaaaattctaaataagatgaatgatcaaatgaatacatgtccaaaactcaacggcgtcaaacattaaaaaccggaaggaataattataaagaagtacagttaaatccaattgcttatttaaaactcaatggtgtcaaacattcaaaaccagagagaataattataaacaagtacaatttaatcccaattgcctaatcgcagataatcgtaggaaaattgtcataaatatttgcagaaaacactccactttgttgcagctgtcaatattacaaccctgatattccataaacttttgcaatttatattggaaataaactgatttcagtgagcatcctgcaattctttaaggctccctttgaaacaaaggaaaaaccataggaattctaaaagattttatcctacgaaaaatgatcctaaagagttctttgaaacaaaggattcctaccaatttctttgaaattcttatgaaatggatcttgctatagcaattttggaggaaaataagcatgatgtcttacctcgtgttttcctcttcatatgtctaaaattccaacattttttctatgtgctaatcaaatgatagtttgaagacttcctttgtttcaaaatccataagaatccaataaatatggtattttatttctatgttattttaatttctatgttttctcaaacttgcgtttcaaaggtacccttaaagtcaaatccattattttgaacatgaaaattagagaggaaggtaggaaggacattcagaatttcagatgcacacggtttcatatatgcatgcaaagtgcatgagcgttcatgtttgtgacggttacatgcgacgacaacttgcttttctgttttgtaagctcttttttttctttctttcttcgtgctttctctttcgaaccagcgtgcacaagcaattgactcttgtcgccctcacatttaatttggcatcgagtagaacagctcaattcgcacgtacgagtgcaagtggttaatttttcatggttgcttcgccgaaggaagaattgagttggactcagttcaacacaatatttaatttaatttccaaaataaaaatcggtgatttttttctgagcttaaatgatgaaaaaagtaattactagagaatgttttttagttacaatttacaaagaagatgcgctcacacacactcctacacacgcacaccatccacacatctatgagtgcgtctcttaatacacattcaagagatggagaccagcaacaaattttttagcttcactaaattattattgaaagcttccacgtgtatacatgatattcatggtgcttttttaatttcattagttataggtccgcgcgttacaacagttattttataaagtttagtgggaggatttgtgttaatgggttgttcggcttttttaaaaatggctggttttttttgagaaattggtttttcagggtggatatttttagaggaaagaggtttttaagtgaagtggagacacgactcttctcttttaagtagtacggatagaagaaactagtttaatttcacttcatccaattaagctatgatatgttgataatgatacgtcaaaatgaatgcatttgaccgaatcatccataccaatattgagcatcgactgatggagattttggcacctctagtactactgatctaagaagtttttttttaaaaggaactgatctaagtagttaatttgtaactagatgggtactttaccataataaattgtcgttaaccatgacttgactctttggcgacgtaatgatgaagcctgcatgatgcatgcacagtgacacatctcgctcgcgcttatgtgtccactggatcaaaacccaagcaacaagtgtccgtcaaatagtactcactccgtcccatttgatactccctccatctatttttgataggcatatttacaaatctgaaaaatttatttttgagaggcatatttcaatccaacaatctgactttttcggatttaatgcgtgactcaccattcttccacacaagattggctacttgggcatcgggaaatgtaaatattaataaatcgcttgtttacgaggaataattagtagcatgtttaaatagataataagtagaattatttatccttggtctatgtgccaagatgaaatatgactatcataagtagatggagggagtactatctttggcccattttaaatgcagccgtgagtttccgtgtccaacgtttaattgacagtacattttatttaaaaaatttataaataaaattaaaaaaattagtcacatgagtatattgttatccatgttttaccatataataataaataaaatattggtcatgaaaaatttttaaataagacagacggtcaaacgttagacataaacaatacaaaactacgatctttgtaggacagaggtagcaagtattttaatattcaactctttaaatatttaattaataaataatttattataactaaatattattttactgaaaaaaatactattagattgtcatttaaattatgattttgttgtgagattagttttaaaaattatatcaaatttaatcgcgccttagtgaatgggacatgggagtatcgattctacgagaggaaaatggctgcacaccgtctatttggttgcgttgattcaaactatttattcctcgtgatgttttttattcatcattatatgatgcctaagcaatactccatttgatctcatttacttggtggagtacagagtaagtccaatcaaccatccatgaagatcagagtgctagtagtagatttgatttcttcttttcaagcttggacaaaacctacaatttggtggtttccaccctcttgtcgtgcgccggcgagcccagggcagtggctgcctatggctgccggactctgggttcgccactggttgatcacttgatcctaaggatgctattgaggtataagtcggtataagtattttttaccgggttgaccaaacatttaccagccaatttcattaagattgaggaaaataaagttttagttacaacgacataaaggatgtcacgccgatctcaagcaaacttaactcagaataaaagaagaaaaagtggggaaggttcacctctaagtcggtataagtaatctgattatctatttacaggactgtagcaagaggggagaaaaactattcctgatatccaatcagtcggcaccacatcccaaaaatccaccaaaaaaacaaacttgtccctctctctcactcagtgaacccgttccaatacggcacataccaccaaccttccaagaacaaggccaatactacgtacgctcagatacaaaaccagcacacaacacctccctatataaaaatcatatgatttaacatatgaaaatgcttcacataaaaacaaaactcttacgctacgtgctccaaacagtatcacgctccatgaaacgttcgtcgtcggcggctcgctcgtcgctgctgaagacgacgaaaagaaaaggaaaaatcagaaaatttctcagcaggattgatttggatggttagaaacctgtcatggtcaggccagggctgtaaattgtgcatgtgcaagtgcaagccgccttcttcgttcacaggtggtgtgcagccggaggaggaggagggcaacgacgacgacgacggcggtcaggatagtcctcaccggggagggcgaccggcatgtcacgtagcggcggctcgccgtcgtccgcagctgcgtgtggctagattcagacaagtcagcagtgtttcccagctgacatggggctagcatcaggctgatgcaactctgagttcctgtcaaaatgttgagaggactgaaaattataggctaagcaggtgtgtcatgatcgttgatcatcatcatcttggaataaacaagtcataggcatcttcatctcatctgccatcagtgtagcattaacttaatgttgcacgagtaaagtacctgagagaggacggacagggacgagatggtacgaaacggcagcaaccattgaaatggaatcccaagctgctgctgctgcagctgcagctacagctacaaaagccatggatcagcaaggcagaaagttttttaattcttagtagctacaaaagccatggatcagcaaggctgaaagttcttaatttttagttatctccaacttggcgagccgaatatgagcatttgtttaagatggacgtgaggacgacgataattaagcatgaaccaggtggtgtttcatcattgcgtgttatgattagagctctgcaatttggcctgcatgatagcatagcaagcaagaggatgacatttctggtgctacattacaaggaggaagacaaggaggcatcaaaccttgggctccacagtagcacaaagaatgagactggagtctctcttgcagataaactatgatatgtgcgtcttgattcccttccacccatatcttcatcccttagccacaagagcatggtgtggagacaagagcggtagctagtgcatcgcaatctccctgatatcacaaaagcactgtcagaaagggggaaaaaagagagtgagacaaataaaatgcctcacatcagaaatgcagatggacagaatgaatagagtaaggtccttcttggaatgcagatgctacacactgtattcgtatatggtggaaagcaccgtcagcaagtttgatattagtggttaagacttagaacccgagagatgacaaaaatgcagtagtgcaacacagtaaattcatttttttaaactttgctctgatacaaagtaaatggaaggtacacgatatggtgatagagaaattggagctaaccacatcttctggagaacacaaaaacaacccagtaaacaagcagttgtcagttatcaccatttacctattttcaacatgaccgcagatatcagcctatagcagagtgacatttgcacactctctctgttacagatctggaaatgcaccagcaaatgcctcaaagaaggtacattacatactaggaaactggaggctggcctacaagcatcatgcatgataccaaacctggagaggtgggcccacaacacaacagggttcggcccatgggctggaattgatagttttgaggccttttaaagtataaagtccacattgtgtcccacatatatggttataatctaactcgtattcctcaaccacatctttacaacccccctagctattaaaaatcgtgtaattcgactcttcttctgtaggcagttttcacttatgtgtcttgttgagctggttcaaccggctgaatcagcacgtgggacccacacataagcgactcctctctttgtccacggatggacggcggtgcgatgacatcaagcgacaaggagcatccttcccctacatggccaaacgagctcgagtgtggcgaggagcaacaacgcccggcggacgagcccaaatctgcatgagctaggacaaagttgctggctcggatggggttgcaagcagcggctcgagaaccggcgaggtgtgcgactcttcttctccaaattaaccatctagaattgaaaagagaaacaatgctggtacaaataagaagaaaatttgaagcaaattgagcagtggtgaattaggattcacctactcactataaactaggaacggtgaccccaagctccggttccctaccatcacgcgcagcagcgtcaacccgctggtgtctgccacatccacctgcaagcctttacgtctcccgtcctcgcctttttttccccctgagtccaagcgccatcgttgtgtcgcttctttgctggtcagtgttcatatccatcgccacccgggctctctactatgccttgaggcctcgccgctcgatctgcccgcactggtgctgactgcagagacgcctgaggaagagaacttgagctcaccaaacgccgccgcacactccctcccttcagcctcaacttgaactggaacgtgtgggtggcagcgtggtgcaacctgtggcgctgtgggaaaaggggagggaggagaaacgtagggtcactgagatgaatgcctcacatgctgattcatccggttaaaccaagtaaacaagcaatgttagtgaaaaccgcatacaaaacagacgagggaatcaaattacatcgattttattagttagagggttaatatatatgagggatacaaaattagatttgacatatattcgagggagtcaaaatgaacttatccccattttaaattatttgaatctgagctcagaaatgggtcaaatcaaattagtactctctccatactcgtaaaggaagtcgtttaggacaatgtttaagtcaaaccttggaaatataaatcatgaataactctcaagttgttgagtttgaaaatgtaaaaattatatgaatagatttgtcttgaaaaatactttcataaaagtatacatatatcacttttcaataaatatttttatagaaacaagaagttaaagttatgttttagagaccgtgtcgctgtcctaaacgactaaacgacttcctttacgagtacggaaggagtaccaaatttccagcatactagactttggagaattgtattacagacaaactttggaacgaaaactaatatttgttgagctggttatttttaaaaaaaaagatgtcgagaattattatacgtatagaaagttagaaacacgtgcttcaatcgaacttgtatttttatcgatccaatttagaacaggtagcaaggatggtggctcgtggtcaacgtgatttgttacggcaaatgggtaaacaaatcagcagtgctccagtaatgacaagctatcagaacgtcagcacgtgaaaagaatcttacaacgacgtggataaaacaaaaaaaaaatcatgctctagaccaactgcaaatcacaaacacaacctggcggttaaacaaagctgtaacaacaagcagcaaattgattatgttacatataaggttataatacgtgtcacaatcctgtcagatcctcatctctccttttttattattaagcctcactcatttcaacagtctacaatatggattacaagccgtaagcctcggtgatgcgttggtcgtaatgcagtccactgcttaatgcaatcgctacatgctactgtatttaataataatacaatactaggtcaagtccaacgctgtaaggtgaaggaatggtttcttgattatccaatgatgtgagcaggcaaaaaccctgatctaggaagcagtaagaatttcactgttcggcataatgttcatcttcagaggctcggccgttgtttcttcttgttgttcctgtaatggtaagcacaacttcatggtgactctaacatcagtacattagtaaattttaatctcctatcttccacagaatatagaccaacaactattttgcctatattatatgaaatccaacctaaacagaatagattctgcaacagtaaggaacagtctggatgttctaaaagaaggttataaactttctaacaaaaaaggtaaggaacagtctggaaaacaattctgaatgcatattcatcatgactacagttaacggctctgagttcgggtggcaagtgatggccatcacagcaaaattgattataaaagaaaataaatgtggctttacaagttaccaggatttgaagcaacttaccctttcaacggtagtacaatacgcctctagctctctccttgcaaaggttgggagaacaaatgcggctctatgcatctgatcagcagcaaaaatcattaatgagtgtgcttaagtgttgataggataaggactaataatactaaagatcaaacaactaggtagcagttcattcaaaaaataggaaaggcggccgtatagaagtactcccatgacacaagacaaagttaatcatagcagataaatgtaattcagaagtaaaattccttattaattttattgggaatacagtccgcacaccatgaccaaaaaaataagacaaactgaaacaagatatagaaattgaagattcctaggtaattctttagagagaacaaacctctgaattataaaatctaatatcccttcctgcttccatagctccttctagtttttcaattggatttgcaggagtcaggaagttgactggtggaccttctttggcacatagcagaaacccaatcacaccactgcaaatgcaaaggaataaatgtatgttaaaagtgaactccaaacattgcggcaagccagtaattaccacttgaaaaacatcatctaggcgatttatgcagcttaatgcttcactttcaccatattaaaacagtggagcaatgagcttaatacacaataaaaagaatcgcaaccaactgtctaaccagttcgttgtctaactgaaacagtggtaccgccagttcactgataacagtatcatctgttaggaacaaacccaaataaacgtgagtagaacacaatgaggttgacaactaagacatttttaactcatcatataccaaaatcagtaatagcataaaagaaaagcaatgttaacatatcaaagaatttctaatcataaaacctggcttgcatacagaaaatggacagaaggagaaaatggaaacgaatgaagaacctgggatatgtcgggacactcgtccaggcatagtggacagaacccttgaatgtctcacggcagatcgaaagcatgtcctggataagatgcgtatgcaaccacatgctctcagcctgattacaaagaacaccaccaggcctcaaagctcttgcgattgtgtcaaaaaatggcttctccacaagttcctgggcaggccctgcaacagataatgccaaaacagatagtgtaagaacattaccatcaaatgggaatacaaaatgtaggtgaagttttcaagtcaaacatgatcagaccagttttttgttcatataagaatttctattgatatagcaaaagctataaaaactaaagagatcaggaataatttcatgggaagtaaaaaaaagaacaatattctagcgagctgacattcagcgacaaagataaatagccattgtttttgaggctttataataaaaaaaagtaacggtacagcagcatgagctcaccaatcgggtctgatgaatcgacaataatagcatcatatgtcccttcaggagcattccttaagaactccacagctgaaataaaataggacagttatgaaaattacaaaccaaagaattgaaaggtgcatctaaattgcaaataggatatatttttttcacagttataaacaggtaatattgattgtgaacgtaccatcaccaacatgaagccgaacacgaggatctttgaatccaacagataaatctgggaagaaatctttacaaacctacataattaagatgcatatcaggaaagtttgttgtgcaatgacatatatttattcaaatatcaaaggagaattgttacatcaataactagctgatcaatttcacatatatcaattgactccacagaaccatgtctacatatctcccgaaggactccaccatcaccacctccaataaccaaaacctgaaatttggtaggtccaaagaacattagtgaccaaactaaaattttctatagaagtaaggataaaaggaagaaaataatttaagacaatcaatttcgagtctgtcaaaagtgttaatttcacctctaatggaaaaaaaataaatggagtccttactttctttggggatggaattgagcaaagcggaaggtgagtaatcatttcctggtacgcacattcatccttatcagtcaactggacaataccatcaaggacaagaacttttccataggttgaggactgcataaaaaaaaaacaggtcacacaacactgtaatacaaagtataataaatactagattttttttttattttggctgtcaataggtgatgagaagttgagaacctcaaaaactaaaacttcttggtatggtgacttcccctgatacaagatcttctcaactttcagtgaatgggcctctcctgtgtacaaaaataaatcatgagagctgtgaggattaattggaattgttggattatatctaacagtgagatggcaacagaacaacagatgaaaaaaaagatttaggggaaaattacaaaaacaaaaaaactgggggtaaacaaaagtatccagacagaacaagtgaagtctagtaatttttttaatttgctaacacacaataaaccatgtatctataagaatagtatttatgaacataacaacatgtgaaaaatacctggccacatcgggttattgtaatactgcactttgctcgttttacctgcacaaaccaaaattcagacaaacgaacatcatcatcatccaaaatagggcataaagcatctatcgtcatcatcaagaatcaagaaacaacaacgtcacataccgccgcgcgagcggggctcggtgaaccatccggacaccacggtggcgtggcacttggcctcggattcaggcgccgccgccctggccttgacgcagcaagggggcagcggcttcccgttcccggcggagccaccaccaccaccagcagcagcatcacccccactcccccctgtccgcgccgccccggtcgtcgagccatttcttgcgcctccaccctccatggatcctgctcctcctcgaagttcccagcctctacaccccaaaaataaataaataaaaaatcccacaaaaaaaagcaatcaatccatcaaacgagaaggcgagagcgcggcgcggggggggggggggggggtgttcttcggggggtgggggtgggggtgggctaacctggggcgcggtggcgagcggcgaggcgggggggtgcggggagaggaggcgccgccgcgagggcataaatagagctcctcctccggtggcggtggtggcttctcggctattcctcctcctcctcctctcttccttttatttccatctttttcttttctccttctggggtttccggggattattattatatagcaagggatcgcgagattgccgtggacgcgtggacggcttatcggccatcggatggaggatggacggatcggattgtagcttgggtttttgtaacccatatgtatgtagtattattattaaggtatccgattattagtggatgtgctggtttgagccgtgtcaaagtgtgccaaaacaagtgtgtgacatgtgtacactattaatatcatatggttatgaggaaaataattatatttcagatgatagattttggctgattaaaatgtactcactctagggtaaaaaaaattgttttggacttccaaagatatagctttgaaaattatagtagcataataataatattatgaaagtttttatatgaatggctttggttgcaccgttttgtcaaatcttgtattgcaaattacacgagatcgagttaacttgtattgactgcacgtaccttaaaatgaaacggcatttctttttatctttctattggagagatatgttccaagatttgcttttttattggagtacgacgaaaggtataagtcaagaaattgcaaaagtcaaaagttcacaacacctaaaagctaaaccgtttaagaatgtgaataggactgttgcataggactttctatcaaagttctacacttctagagaagtttgtgctagtactaatggcaaaccaacccacaatatccattgtcaagaccttttttgaattctaagtgccaacaacttgaaaaaatcttaaaagtttaacttctaaatatatcaatacctctcggttatcgcagtaaccatcttaatttttaaacttcactctagatagtgataaccactactgaaacggtggaggaaaatcataacaaggacacatccattaatcaaattcaggtttctgtctatttatcttacttttttttttcaacaggacgaagcgaaaaggtgtccttatctgtttcagggctcaatatttagtgtcagatgaactgcataatttaattagtggatagagtaagaagcacaacacgagcatcaatttcgccataccactaattaaacacgagcggcactaaactctactagagtcaaatattacagaaaaataccatcagccagtactcccatgcatctcacgctcgggcatacaaataatcacaagaaatcacccggtaatattatagtagaagattttctgcttcacaaggcaaaacagatcaaaagtcaagcatatatggtgatttatcgatattccatattaggatagcaattaacgtaactgttgtcaaacaaaaaaaagagaaacgagggcgaatatatgcgacaactggagccccattgagccaggactttattagttctgaaaaagcctctttatttaagggaatctctctttttcagttgggttctattctgctctttcttgttgattagggcatgtgtaatgtgggagctgagacgtctttttctctcttaaattccagtctatattttaacaatcccatcgtttggtatattgaaggaaaaagcaaaacagcatatttacaaataaaaaatcatttataaataaaacttttatatatgtgctcttaacaatctaaaagcaaacactgaaaaatagattacaatgaaaaaactcaaaatcaactccatatttaaggttgaaaatttaaattttagctgatagatataagcataagcgaaaagataaggttataagactattctatataccatattctaatgtttttaaactaaatattttaaagttttatttttatcttaaatccaaaacattaagaattagagtagtgctccggtgcaatatacttgcagtattctactacaagtagaattaatctcgaccgtttatgttaaaggatagattagtaatctcttcatacagattaggggtaattttagaataggatgatcatctcgaccgtttgccgcaacgcatctcgcccccgacgcatcaccgcggtttctgctcctcctcccggcaggcggcgacgcggccggcggcactgcgcccgagcccccgacgctggcccgcatcactaccaaaatttctcatcctcctcttcctcttcccctgatttttttttgtcatgatgtgaccagggcagggtcgttggtggacctgctccattggtaagtttcctaactctgatatcgcattcttgctgatgaaaaagatcttccgaattgcaacaatctgatatggctcactgaacttttgatctttgctgatgaaaagatcctccaaaatctttactgaaattttgcttcctgaattgagcttaactgttgcataatgaactgcgcttacatgttgcatactgaactgagctgggctgcatttctgtgtctgaaacagtcgctggcattggttcacgccgacgtcgacgacgacaaggttctcttcgtgccgtgggtgtgagtggagactgacttcaggactggcgacaacccgtggtgggcgtaagctataacaacatgatccatatcatcagcagcaaaattcacttctatgatcagcttgtagctataagtccgttgtaccctataagaaaacgctgctgcagagaaggcggcgaggccagggaaggcgacggcgctggaggggacggaggcggcgagggagaaggaccagcgacaaagacggggatggagaggaacatgcgatggaggagagggatggaggggaatggcgttgattagaataggatagggagagggtgaacagttaaataatggcaaattatgataatacctccacgcgaattattatctctagacaaatatacccctccacatttctactcccataaaatttggtgggagtagaactagatctcaaccttacgattaaatacgatcaacggctcagattaatttctactccaagtagaaaggaccggagcgagctgctattgtgttccaaataccaattcttatgatttttttatgtgttttttgtttctatgttttgcacagccattcgtttcttattcttactatcctatcatatgttttatgtgtttttttgtttctatgttttatcctatcatatgttttgtgttgcttcgttccaaacaagctctaaaaacgaagatgtcctggtaatcaaccgggtttgtggtctgttagcacgtaggaatgactaggtattttagtagtttttttttttgcgcgatgaaaacattttagttctgtatgcaccataaaaatagtttaaagtcctgattgaacagaaatcgaatttgaaatattattctgcttcacatttagaaaccttcttgtccaactcaaacccttcttttaagaaaggggcaattgcttatttgaccctgtttttaactgtaattgccgatttgaccctactttttgatttgcttatttgaccctcctttttgagtatgaaggtccggtctaaccctatttcatttggatgaagtaacggtgttaattttgtggtaaatagtccattttgcccttgcttatttgacctgttttatcttgtttgtttgcttgtttgaccctattttgttataccgtgtatatattcaagaatgttgaaatgtttgtaataatttttgctcaagtaacagatttggcattaatttgacaaatttgaaccattttgtaaattttgacttaaatttgacagaattttatgaaaataaattaaataaaatgtatcacaattatgacagatttgccataaatttgagaaaaatgattcattttgacagatttgactaaaaagttgtcagaattttgacaaaatgaattaaacaaaattttgacagcataacttctcattttgtggattccaaagtgcattcaatatagcataaacatatagccaaatccaacaagttcatatccaagcatgtgacaacatacatcagttcaacatgcacattactaggtccaacataaggccaacaaaaacacaccaccaaggcccacaaaagtgcaccattaggtccaaaacaacatcacatagaggcacaaagccatgtccaacatcacacaaaatgcagtaaatagtaggcacatattacatgatccaatcaacagcctaacaaagcagctagcctacctcttcccctacctctgccacctccagtagcaccatcaccaccaccacctctagctcttcccctacccctgccacctccagtagcaccatcaccaccaccacctctagctcttcccctacccctgccacctccacctccagcaccatcaccaccagcaccacctccaccatcaccaccagcaccacctctacctccacctccacctccaccaccaccaccaccaccaccacttgaacttgaacttgccctccctctggctcttccccttcccctgccacttgcacgtccacctcgtgcgttcatggtaccttccccatccccttccccttcacatccacctgcgcttgcactgtatatgggagcataagaaagttagtttgagcaaaagttatagatgaactaaagtgaggaaaaattcacttacttagatgcatgtgcatcactgctactctcttgagtgccttttttcctcttttgactagctgtaaggcctccttggcaatacttagctgtatgacccaattcatgacactctgagcattttctttttttcctttggccaacctcatcagaagccttcatcttagagacccttggtctccctggttttctcctcaatttgggcttcttgattttgtagcctacatcaaccaatggccacagatgcttggatgtcatagggttgaataaccctgcatatgctttcctgaacctctcaacggagaagcattcatccacaaaatcacccatatgtacttgtctgctaagctttgcaatgaaagctaaagcatggctacatggctttccacttatttgccaagccctacaactacaagttctctcattcaagtttactgcatgtgtaatggtggatacagttacctcggcggtgccatctccacatctaagaacttcatggtccttgatagccttgctctgagcattaagatctttggtaatggctgggattatcttgccctccatatttctagcaatattggctctcaagtcaaactttgcaacaatcatatgtcttattttctcatgcatatccacaatatgcaagtccttagtttttgacacccaactgttgaatgattcagaaagattattattgatgtagtctaccttacatagttcaaaaaaattgctcctactccaaacatatggatgattctcatccaaccattgtattgcatcaggacacttctcctttatcttgtccatgtggtattcatacctctgaaatgtgcagctcttggcagctccccacatgttctaagaaaacaatgtgccatgatacttcttcttcatgttcttccacaagtgtctcatgcactctcggtgttccactcctggatagacatcatctacagctccctctatccctttgcctgttacaacaaaatgacaaggcatgagatacaagtgtacatcacagtcatgaacaaaagaatgcaaaacagaaattacttgttaatatacctgcatcggtgttgatgaccaatcctgtaggagtacctatggcttgcttcaagttctgaataaaccatgtccaactctccttagactcgatttcaatcaccccataggccactagaaatagccaatcgtggccatcgactgcaacagcagctgccaactgacctcttgaccttcctgtcaagtgagttgaatccattgcaatgtaaggacgacatccttgcaggaaaccatcaatgcatggtttaagagctacaaagaatctcttgaaacaaacatccccattatgctcttcagtgtccaactcaacaacactaccagggattgccttcagaagtgcctctttgtaagtcggcaatagatcatagctctcatcccacttcccatatatcatgtccatagccttctccttggccctaaaaaccctgaaatttgggacatccatcttatacttcttattgaccttctcttgcaactcctttggtcccaatgtgggtttctcctttaaccagtccaccaccctatcagctatccatcccttagaagccattgtatcaccacacttattaactgaaaaacaagtgtggtctggcccattaagcttaacctgcatcaaacaatgtcgggtcccaaaactaaagattcggaaatcgacatgtttaactgtatcaagccctggatcagtagattgacacagcttcaacaatctggatcttcattgcgtacatttaaacaaggctccaaagaagatgttattacataaaataataggggaatttacaagactgtggctaactattacagcagaagttatatagtgactcaactctaaggttttgctatagacttaaaccatctaactaatctagatttgaaaactaggttaaaataagactaacttatatgattgaactcctggcttcggcaagaacttcaatttaattctggaaaagggggttgaagcaagggtgagtacaacgtactcagcaagctattatattcgataatgagtgaatgaaatagtaatatttgagtaggattacaattacttgcagaaggcagagaatatagaaatagaaagcctgatgttttaaatgcagcagcatttagtaaaatcttgaattaggtttctaaccaaagtaccatatgagtcccgatactcaattccgtgagcacggctattcgaatagattcaggtttactttactacagtaaatgtacgctttacccgcaatccatgacatgctaatattcattagcttagtcatggcaaagcttttcagttactaacatcagtggcacctgttccatgaactctcatcctcatgcgctctgaacataacattgtcagcagcgcgaggagttctggcgttcccgaggtttttagagagagaactggttgagagacccccgtcatctcaaccaggttttcacaattatatatatacttgagctcaataaatcatttacctgcgcctcggtaaacgtcacatttgcccttcgcggcatataattgcctcctgcgcgaggacttacaatagaaccactgtacagaggtaccacctttgctagataacttactttgcaaggtctgtccccattctagaattgcggtcgtactcgttcgtttgacataagtacttggtaataactatatcgactgagacagtactagccacccggaaatcaaccaattcctacgtactgtcccaatctaagttcattatatttttatacggactaactaggcagggctaagcaaagctagcatatctggtttgctatgttcaggttatgcattcaaaatcatgtatgactaatgcatagaatagagatataagaatatgggataattatgctcaaaggggaggaataataacttgccttgctccaacgcgaataaatcaaggtaggcaacctgattatccgatgctcgaaataccacaggttgccatccagaatataatagactctactagagaagaggaagaaccaatttcaataaaatccataaaataacaagaaaacgataaacaactaaaagggctagggtttagggtataacctatctcctttatagggtgtagggattactgggctaatatgtgtaggttctaaagggttggaggctagaggggattaagtaataattgtcacttatattttatgtgtggtttttggtttcttggagaataggggatataccgaataatctaactggttaagtggatatgtggctagcattggtcgaggttgggctttggtagaagaatggctaggatttagttgttctcgagtcgatgctgaaataggatagcatatcagctcgtatttcatgcataggctatgggtagtagaagggtaaatggttggtatggagttcggatagcaagctgattgaggtaggataaatattagctagggtttaggtgtttgctagttgctgctagagttggacagtataacgactagaactggtatcttttctagccggtatcaacggatagtttaatggctagagggataggaggtttgtgtgggtttagtggggcggaagtgttactccgacaaccgtgagtggcggcggaacagctaggatcacacagagcccaatagctaactgtgcagcgtgctgtggaggtcgagggaatagtgtagctccgaccactataggcatcgaggcgtggggtgccagtagcagcacttcgaccttaggtttggttttgccgggctttacaaccaacggcctgatgtcggggatagtaaaccgcgagcgtccccatggaaggtgtaaagttccaactggcggctttttagtggctaaagggtattttgggacaaaaagaaaatatttaaaaaggcaaatataaattcaaactatatttgaataaattcaaataaaattataaaatagcaaattttgtgtcaaaagatagggtttgaatttagataaatttaggtccaagtttcactgaaatcggatctacggtttaggagatatgggcttctaaagaataggatttgaattaaatagggaaaatacaaaatgttactgtgcaggggcccacctgtcagtctttctttttctttttctcttctttcttcttcttcctcccgtcatcttcctcctctccttcttcccgtgtaacaacagagagagagagagaaggggcgctggggctccagtggccggggatcggcgacgtcggcggcgacttgtgttcccggacgacgcgcacccggggaagtcggtggctggccgagagagaggggaagttggccggaacggcaagtagaagagcttctcttcggctgcaaaggaggtgttgtggtggttgctatggggtgggggagaagggggaaacgggaaaaatgggttcgccggagggaggcaaagccgatggtgcaaggaaactaggagggaagctataggggaggagatcgaccgatggcggcgtcggccggacttggcaggagagagagagctcgaggagctcggctatggggaaggaaacggggtctctccggctatatataagcgaggaaaggcggtggttagaggcggtttcggaggaggagacgaaggggatcacggcaacggcgacgtgaggaagagaatgacggcgccggcttcgttctcctattggctgatgaaggcggtttggtgcagtggctggcgtcagcagggtgaggtggcggttgacgtcagcggcggatgcttagcggcgaaggaaagacggcggcgacggctcaaagttgcgggcggcggcggcaaagccgcgaacggcagcagtggtgacgtgggcgccatgaatacggtggcggcgctcacagggaggaggagggaatcggtttggctgggaggggtagctgggccggcttgggccgtgcaagagagaaggggaattcggcccaatctaaataggaagaaagtctaattttcatagaggtttaatttagaggagagtttgtaattggaagcaatttggatggctaagttttacaaggaattcgaattcggagaatatttgaataataaggtttgaaaggaaattatatccaaatataatttccagaagagatattttctgatttatttgagtgcgatatctttagaggtgaagtttgagggaatttatttggaagcactcaaataggaaataggaatattcaacactataaataatatggctctagatttaaatatttttgagtatgtggagggaatatggaaggagtagaataaatataattttagcccaaaatatatggcatggattctagagaagtatttgaggctaaaaaggaaatttggatcgagaattaaggataggtttaagatcaaagggatggtttaacaattattggaggtttaggttcaaaggaggattttcttggaccaattcataaaagtataaaggattttcaaactaaatttaaataaaggaaatatttggtcgaaagaaggtttaagatgcaaaatcaaatcaaagagaatacctcaatttaacgagaccaatttttagaataaaaccacgaaagattttaaataccaaaaagggattttatgcatgttaattttaggaggtccctctaattgtaatttcttaggtttaggaaggttattaagaacataagaatcggcatgatgcatatttagaaaatagcatatttttagtatgttacaaacaatcaatggacttgttaaaattcacataaaggcacacatgttaaaattcatgattgaaagcatggaaaaaaaatcagcgcactacatagcttgcaaccatcatatttggacttgctggtggatgcaaaaaacgtccacttgcaaccctcctctgctcgcctacactttgccctaaacctatccttgttttttttaacagtttggaaagcataatcatttaagattgcatggcaggttactgctgatttgcactcatcaacatcgcgaaacagcacatctacatcaatgcatggatcattaacatcatatgaaaaatcatgaatatcatcacaatcatcatcatcatcatcatcaacaatttcatcatcaggttcatagctgttgtcggagtcagagcattcagaatcatagcaatcagaatcagatgatgcagccaagtcagtgtcatagctactatcacttagtgccaccaatgattcagtttcggaatatgagccctcctcatcaactccgactgtctcatcactgacccttttccttgtggctcttttggtatgcttagactttgaaataggtggctctaccactttagctgtgggtagggttagatcagcaggaggacacaaagaaatatgtggagcactttcaatttgcagctgcacactatttctgaaatttggatggacccttctttttgtgggagagcattgcaatgggcctttaaattcatcaacatcggcttcaatattggctacttcatgagctatgttcagcgataaccactcatgcaattgctcatcactactaatctcaacccaagcatcatcacaaatacgccagaaagtaatgtattgtttagaacctcacacaattttagagccgatgaaatcaactaactgcagcaatttgaagctagctatgtccacatctgttgtaaaatgcctacttgtgaaataggtctttgggcccccatctggcaaactaaaatgtgaccttactctaacatcaagaatcaaattacatggaacaggcctacaaataggagcaacacaagataaagaacaactttcagtaaaatttttaggtgcttgtaggaatggagacaacatacaacatataaaccctaggttagattagcaatggagacaccaagttcaattagagtaagacacaacatctaaaccctaaattagcactggacacaacatctataccctaaatttgcatggtattgcatctgttcctataacctagcagggtcacaaccacaagcatgcacaggttcacaggatcacaaccacagggtcactgaaagagaatagagggaaaatacctttctatggtaggaataccttgcatggttgagggagcgtcgatgtcggctacctccgagcgctggccctcctaccgtcaccgcgtgtagcacccgtcgccgccccgcaccccacagctcgctgtcgtcgcccccacagcaagccgttgccgcgccaccacagcaagccgtcgccgcgccccacagctcgccgccgccaccctctcagatcggcgccgccccgcgccccatcaaaccgccgccgccctccacctccacaagcgggcgccagcggggctgtacatcacgccgccgccgcctcctcagctcgccgccgcctccccacacagatcggcgccgccgcccccctcagatcggcgtcgacccggaccggacgtgccgccgccactgccctccaccacaacgagcgggcgccggcgggtctgtgcttgacgccgccgccgccccctcagctcgccgccgccgccgcccccttaggccgccgccgccgcacgcgtactcgccgccgccgccgcacgcacgagtgagagagaggtgagaccgtgaggaatgcacgagtgagagagagagagagtcataatagggtttgggctttggagggtattttcgccattaggaactctgtaaagattttcttttttaaaaaattgaaccctaacggagttagcgaaagagggtcagtcggaagcttcgtactcgaaaaggagggtcaaataagcaaagttcaaaaagtagggtcaaatcggcaattacaattcaaaacagggtcaaataagcaattgcccctttaagaaacgttcaaaacatgtcaagattattcccaaacggaagtatcttcttgcctagacagaatattagtgagctgtagtgacatttctttgttgaaaagttgaaatgttcttatgagagcggaaagtgctgccatttcaaaagcagggaatgtgtgactttgcgtccttttcagccaatacactatcattggcacgctttctgtgcttctaaacagttctccctccattttatattataaattgctttgtttttttcaaatttatttaagtttgaccaactttagtaaaaaaaatatagtaacattttcgatataaaacaaacatattatcaaaatatattcaatgttaaatttaataaaagtaatttggtgtttcagatgttgttaattttttctataaatttggttaaacttaaaaacattgactaggaaaaatgttaaaacgactcataatacaaactggaggaagtatgatttttataaaaaagaacttttttatcaatatttctattaaaaaaacaaacttttcaactttctaatgtttagtttactcatttctgcactcaaaaaattgtcataaatccatcagatataaagaacaggctgaaatcgtcatttaaagatagcagatatggtacttattaacataatagcttggctttctcttaaagtcttaatagtatatacttatatacagtagtatacataaatggctttctcttaatatataccgtttttatctcttgtgagtatcatgtttctgtggctttaaaatcacaatgactattatatagcatctcttttacaatgtatatagcaatgagggagtgttcggctaggccccaccttgaagagagagggagaatagagtagcaggggagagatatagggcctgtttggtatagctccaactcctaaatttaactccaagagttgagtctggagtggagttgtgaagctgcctaaacccagctccacaactctagttcattttgtgagagagttccacccagctccactcccagttttggtggagccgaaattgttcggctgagctccaactccagaaggggtgaagctggagctggagctgtgccaaacaggcccataaacaatgggctattttattccttgtgatagtttttatggctaacggtggatcatccaaaatagatctataaggaccatcttcacaacatcttcacaatatacagggacggttgcttgagaggattaagaccccctctaagatgtgtttagttcacgtcaaaattggaagtttgattgaaattagaacgatgtgacagtaaagttgaaagtttgtgtgtgtaggaaagtttttatgtgatggtaaagttggaagtttgaagaaaaagttgggaactaaaccaggccctatttctacatttgtgaacgtcctaagtcaacgtgggtatagccaatcaaacaatatgcataaactaaacattgttttgtggtaaaaacaccaattcagacaacacgcataaactagacagtgttttgtgtaatggtagttgtaggaatattagggcccggtttagttccacagtttgaacccccaaaacgtcacatcgaacttttctacacacacaaacttccagcttttccgtcacatcgttccaatttcaatcaaacctccaattttggcgtggaactaaacacaccttaggatatgatcagtggcgacactagaataaatcggaggggggtgcaccacctcaaccgtacatgtagtggcacacggaattttgaagacatgctatacaagataacaatagtcgatagactatcaaatgttaaacatcatactagatgatggctaagtgtatgatgaaaatgtaattagaaattcctactttataaaatgtaaagtgaagggggcacaataaaaaagatactcaatattgcaagacacatttaagcattgaatagatacgtttgagaggacatgaaagaagagattgagaagatacgcaaaataaggtaagttattaacgtactgattaactgagtattagttatttcaaactgaaaatagattaatatgaatttcaaagcagtttttttatagatttttttttagaaaaacacaatgtttagcagctcagggggagcttgcgtatgaaaaacgagggatttttgtctcccttatgcatcaaactaacgcacctagactagttaagtgggagtactatatattggtgtgtgataaaatttaaaagtcaaggagctagtgccataactcttcaaattgaaatattagtacttaggattgatctgcaatattactccactttccttaatcccagttcaacagtataattatttaaatcctaaaatactgtctagaaacattaaaaataaaaactaaaattgaattttatatctaaactttaagatttgatgtgaagaaatcagacaaactaaagaaataagatgacgaagttatatgcccttgcctctatccaatcaactggcgatagacatgatcagtaaaacgaaaaaacaaaataacaaaatagtaggctcgtgcgaccaagtggccatgcggccgtgcggtcgtcccgccgcactctggccaggcattggggttgcgctttggccaggcattgggggtgcacgtaaccgagctgaggggggtgtacatgtagcaaaaacagaacatcaagtactgaaaacagaaatacagggttgtgcaccccctcagcctgtatagcttcgccccatagaaaagatttgattagaatcttttcttatctctaatacctttcaattctctatccgtgtaagagcatcaccaagagtatcctaatatttcattcccaaaactatttttataggaatcctaaacaaaatttgatgtgctaaaatattgatccctccaagagattgtctaaaattgacttcctaaaactaaaaggtgggccctctacaaaaccactaactgaaatttatttccgtctctccctctgtgagatcactctcgcgaactcctgatcgcggcctcgacaacagcacatcaacagcagcaccagctgcaaaattcaggaaaaacagtagagaacaatagcacgagaaccagcaagcagcaacagataccttaatcttcagcaagtgagtttgagcaatggtgcaagagcagagattgggatcattcacttgcatcgctgaatgaatcaccaacggcaaactgcttcgacggatgaactcatcttcatgagagaccaatcccagcaaaaggaatgagcaactccggccgagtcatggatgatgggagccgatgcaggcgggctgatttgcgtcgtatcgaggcggtggctcaaatggaggcagcgaaggtggttgggggatagacgaggaagttcaccggctgcagtgcagatggggccgctgccgctgccaaagcacaagctgccaacaccggaaaagctttggggagcggcgcatgatttctagccggccgcggcccgcgggggagatggggctgcctgcaggacaccacgatgaggcgacgaatgacctcgcggcgaaccccgggtgagaaaatttcatgtggcgcgggaattcgctcgggagagggagaatgggagctagcgcctctccccacttgtggagaacgaagaatccgggcttgggaattccaaccggtgggagcttggctagggattctgttggactgggtttttgaacgaaaatccccaaatttcaggattggaaaccatatacagatactgttggtgatgctctaactataatccctatatataccagcctaggaatgaattggtatgcttgttgcttttcttttttttttatttttgttgagacgcaaacttttgttaaatttgcagatgacagcaaacatgtgcagcaactacaaggtacacaacggccaaagaagtggttaaacatgaagcgatgcataccatgtttatccaaaaatgatgggagggtttaataacatcatacattgcattcagggggaaagaagtctatcatacatacaacgccctcgtgatcagttacatttacaaggtcttccatttcaaggattccccagaggcaggagtacaagaatacaatgtggaagtggaatgcttataatacatgcattccatgtacaacacaaatattacatgtatagatgaagatccaacggtaaatcgaattatcttatataaaccaaaaggcttggaaccaaatggtctatctatgtacagaattcaatcatatactgaaaaatggtatatcagcaggggagagagaacttttaccagctgaagcatcaatttctgcatgtagcaaagtatggacattactgatcttcagcgaaaaagttcggttctgcaggcttctgtaataaccttgcaggcactctttcctgcaaacgggcctttcgagtggcatttctccgtaagatccgcatcatattaccagcaaaacgtgaagcatatagcgccgcaccaagactgagcgaactcgaaccatcactgacaattgccgcttgcaacctcttctccttctcaaacaaagtatcctccagtttctttctgcagtatctatgccaagctgcctgtataaaacaagctgcccaggttctccattgctgtgaatagaatctaaatgtatgctggagttgtttgctgtggagtctcctgaattgggtggctacaaacttcaagtcatcagccctcaaagcaaaagcttcgacttcagacagcgttttcacagtcctggttgagctgggaaggtttgaagctgaagtagggtcaagtgcccatgtgagaagctcttcaccacaaaaatctccacctttgataatattggagttgaaaaagccagtctgtccaccatttgtcgtcatactctcaagatttcctctcatgatgaagagcatttcattcactgggtctccttcgcgaatgatgcagctgccttctgtgtacagcatgggctttagacgatcacacatggcatccaagagcttctcatccatgttttcaaacattggaacctgcaaatggtgagaaaaagaatgaagggattaattaactaaagggatagccggtaattatcagctaactaggaatctttgtattaagccatcaatgacctccattggaaaagtatgggtgtgtctagttcacgccaaaattggaagtttggttgaaattggaacgatgtgatggaaaagttggaagtttgaagaaaaattttgcaactaaacacggcctatattggatatgtaggtcctcaaaagtaatattcctttactcttaacttggtagtggatggtgcattctacactcaacgtctcaacccctctctatatcttttctggctgcaaatatgtaggtatatgtgtattgtctctactacttttaccccccaaaaaaaatcatatttgcacgagtacacgccgatggttgattcgctatttggcaccatgtagccacataaaaagtagattctaggatatttatttatttatatactctggagtctggactaaagtatacttagtagggatctgttgcaatgcacggttgtgatgctaattaaacagaaaaatgatagggaaggtttctgcagtcagctctgtgttgcagagttactaaagttggagctctgtggcaggaatccaggatagagagtagagtacaagtcttgaaaggctgaaaccagttttgcatatcaactttaagaattggtgttgccgtaagcatactagagcaaactcctttctccatgcttcacagagaggaactccagtgttgaaagtgatacgatcccattgtttccaagtttgtctagaaagttaggatggtttattttcctagaagtagcatagcggaatgctgagatatgtcttttgcagaatactggtcagtggtccattagaaagatatgttccatattacatgcaaaacccaccagcacactaaaggagcagccaaagcagtgaaccagtcatgaatttgcactttgatatggcaacaggatttccaaagcaatatgaacagtcatagaacctccctattgttgatgatcatattgtagactggtttatagttgaattgacaagtattcagaagctgacaatacaaattttctaaaaattcatatggcgctttatagaatacatggagaaggaaacaaacaatagggtaattgtctggtttgttcagatagattagactcaatagaggacaacaacgagtggctgactttgctgaatagttcgtggtaaaacaatgtccaagaggtaagctggaaatgaggcgacttacaagggatggatctttcagtcaactggtacagtcctggcctacatttgtaaaacaatgcccacgaattgttcattccataatacatgattgcaatctcccattgtcttccttcagtaaattagaatggatgctctaaatggtatgactatgctacttaagtgtacacacaaccaagaccaactcaacacagacacagtccaaagcactaaatgttcctatcttattgaaatttggtcggtcagtctttcagccggcctggcagaaaaaacactaaatgttggactgtcaaaaatagtactttagtactccctctgtcccaaaaagattgcaattttaggagtgaggggggcaaattagtagggaagggaaatgacctagattgatgaaacaaagttatactataggattgcatttttttttgggacagaatttgaatgctagaattgcaatctttttgcaatggagggtgtagactttaattggctatactaaaccagattactgattagacttcaggaactgccagacttacactatgacccagaagaggaaaggtctgacacaaaaccagaaagtccagaactaacatctgacaaaaccagtacagatgcagctattcaaaataagcaagaaacttggaatttacaaaccacatgcaaattgtttttatgtaacaatctaactaatggtccttgggaaatagaaggcaagaaatcaatcctcaacatatgatttggcatgacatgcagttgggcttagtgttgatcgtggaagatgcatgttgtctcaagatgaaggtatgaaagattgtgcgagtctcaagaataacccttttcatatacacccagatgggacaagaatcaggattctctcaaaacatagtagcaaattatgcaaaggtatgagaaaataccctcatgagaagcgacaggcaaagatgcctctttatctctctcctaagattcttaggaagatttgaaagaaggccctcttcatcaacccctcttgtttcttgccacctatattgttcatgacgcagtattcgctccttgaggttatcaggaagtaatcgatgtgccatccattgctctgtgtcacgccgtttcactctcatttcttctatacgcacagaggcagattgtagataggtctgcaaaatacatgcaatagaaaattacgaaaggaagaaatcgagccgcttacacatttaattgtcatcccgattacaccttaaacaacagagttgttttcattacatgtaatataagtaaatagcattgcaaaaaaggagctgtttaaccctttaatttttaaggagaaaaaatgatacataaagagaatatgaattggctatataactcgttaattgtggcttctattgaaaagacaatatgcatgccagagaatagataaagagaacatgcatgtcagagaaacacatctacagtgtactattttcattaaaaaagatactccacacaagttgcatatataaaaaatattaactacttaatccaattatgatcataataaaaatatgacagttgatatattccatacctgcacattaccaataaggagtgcaaacaaaactagacctgatgtcgagacgaaaacagcaaatagattctcccatgtatacgtgcttgtcttaagattttgaccaagagaactgcaacaaataaaaaactatatagaaacaatattgaagtatgtgttcttcaagggaaaataaaacgaaggttatttctacagaccttagattttgcagaccccaccaaaagcaataaaacaatttttcaaagaaactcgttgattgtgaaacattttgaagagctggaagataaattccgaaagttggatctgcattgtcagttccatttgtcgggcaaaaatcttgtaagaaactgttatttctagctgcattactcccacaaaataaagatcccgaatcacagccatcatgtctactacatgcatctttccaacaggtgtcttctcgttgaatggaaagaaggtaccaaagagctccaaggacctgcaagcatttaaagcatcagttagtaatatcttgaccatgaataacaaaatatgtgcaaactgactagcctcttatgaagaactgaatggcgtatcacaggcatgcatcttttattttattttattttattgcagtatatctacaggtaccagatgcttttgcagacattttggatatgccttgttttttctgaaagttataatggagcaattaagtgactgtcatggggattgggctgagaggtcaaggccccagggcagcccacctgtcaagagaatgatatcgccgcctcgtacacgcctacatgatatggtattggttggttagagtctgttggataggattagactgggcccttccttccatctatgtaaggatggatgtaacatcgtttggatcagcaatgaattcagaatcagtctccctcaacctaagtcctctctcacccctagcagccatcgctgccccgctatcctcctggcagtgtttatccctatgaaccctggcccataacagagacaatcagttcttcagacatcaacatggtgtccaatatacttgcccatgcagaaagggtaatgttggatgccctctataaacccaggggacaggctgcaagttctaaccccagtgcggggcaggctgtacatgcacatcgcaacttggtttttggctgtcgcttatccagaagaattaaaatgggcctgcactcatgctatagaccctgaagcatcataatatcatttgatacaatttcatgtatcaaccccatgcagtaacaaagtggccctaaacttaggctaacttaagctaaacacagtgttaccacaaagccaacatgcgtcaaacccaactcggattcatatgtctgattcgacatgagaaatactactcgggatcggacatgggtgtagaatccaactcagactctgggcatccaattcagcaaacagttccattgattgctaagaggatatgtccaagatatgatcagctcatccacatatacagatagccagatattgtatgtatggcatgcctcactgtgacaacacattttattgtttctactacgaaatacgatatatagttgcctcagacaatatagagcagattgttaaactaaaaacatggttgatactggatagtggatattactatggtactattgtgctgaaaaatctacattaaacatgttgatctttatttcaatgatgtgacaaagctgaagctaacaagcataaattcttcatggacacgcatctatgagaaaaaaaagaatccccatatgacattttttttaatctttgtagatctatgtcccaaaaactaaatactaaagttcattcaggtagaatctttcacgaccacaagcaaagaactattgtcaaacaatattcactgaattatcaccaagaatgaaaattaggcagaagatataaaatggcccaaattagcatgccatgtaatttgtgatgtagaagacttacatgactagcaagcatataaattaaaaggttaaatgcagcaccagcccatgctgtctctgtaattataccagccgatctggtgatttgaaggtacaatggtattattcgaatcaaccgaggtacatattgacaaataactataaccattaatatattttttgccgtcataactgaggagccttgcagacggggtagaactaccaatacgagcacctgataacaaaaataaatactgttacaacttaaacaaaagagatccttaggaatgatacatcaagtcaaccacataacacttgaatgtttgttctacctttgcaactcaaaacaacccgcacatgaaaaaggaacaaaataattcatagaatgcatattcccaatttgttcccatccttacttgtctaaaaacttattgcatgcatgattgagtcaaacatgtatatgtttcatgcataataaaaaccaaacatatcttcagtgcctatattttattatcttctggtttgtattatccattcaattgaatcccccacctatgatacaacagctctatccaatttggccactagaaagcatggaagttcatcaaaccatggtgtagtggcacgatcagtagctgcagatcaatcataaatacatgtcgttttgcacattgacatgataccttaaaattgaactttgaccataactaatttctattgtattatatttaagacctggtaaatttgaaatatatggaagtatttctcaagaaaaatctatacacattatcttcaaatgtccagtctgaatatgtaagtccaaaggtttgtgacaggagggggtagggtacaccagagccaagacaatagttcttcaaagtttttttgaagtgtccagtatatctaacagctacatttaactgattactattgcgttccttaaaatcgtacatgagtaaagtagtacaaaagtgaatgcatattaatatactatgcaaagaacctttatgaccctaacaaacaccagacttataagtagctcattgttttaagtgctcagatctaaaagattaatgaagtaaattgcagatgtacctgaggaaggggcagaacagctaagaaatcaatcagaaaatatgttgatagataccgctttgctattgcaaaggtgtcctcaaccaagacacctcgaccaaacactctagaggaaggagcaataaagcctgtcctgaactgaaaaattatatggagtaaatagaatatatctgtaaaaaatcgcaggacacttgctatgatttccaactttttgtccagatataagcagatattgtcaccatcaatcactggaatatagaagaataacgggtccacagaaactgcaataaggcatgatataacaaatatcttgttccatctctgcaagaatggcccttgaggatcaagaactcttgttttggacttcttttcctcagaagctggtttgttgagggtttcaggatgtgaggaattccctaggaatgaaaaggctcctacagttctatccattagcgagtcaaacacattatgccttccttctaaaactgtcttttcggaaccaacagaatgttctgatctccagtcatgaaatctgcacataaaaaaatagcaggtcaaagtactcctcggaataatgtgcatggcagctatttatattgcaacattttttcagtgtagtagaataagaaatttctgtaagccataaaatgaaccaaattgttagtcatgtggagtaggccttcatgaaatctgaacgaaataaaaattttgtttcagacaccaacacactcttggatgttggtacaaggagtgcacagaagctgacctcacatatttgtcctctcggaaagccatggattccaccaaacaccagcatgcaaaacgagaccaacaaggcagcagaaagggatcaaatcttcaatgtcgcattgcagtatcaactccctgacggtcaccaaccataaatcagtagcatccctcaaaatgcaaagatagcaagtacaataaactggacaaaaattgtgtggcccaaagaccaaggaaagaaatatcaagtccaataacgcgacaaaatgtagataaatcgctagtttcaatagaaaaattatcagtcacaagtgaaatgacagctgtgcagcttgtaattaggcaacagcgataagataagttactccaccaaaacaagtaatggccacataaagtatagatcgagtggtaacgttagcattcaacaattcggttacaagtgagctgaaagtggagctgcaatttcctgctcagcttcaacaactaccgaaaacataaccggtttgtgcgcttgttgggaagaaacagccaaaacaaagaactctcgcggagcagagaacagtaactagtacatgacgagaacccggtgccctgaatccgaatcagttcatggatattcacactacgggccaccagggccaccaattccactagtgaatcgcgcagggacgatggggatcattcccaaatcctgagatgctggagcctagcttcccacctaaccaaaatccgcgaaacctaccccgactgattaagatctgagcgagaagcggcgagcagacgaagtagatcggggggggggggggggggggggctaagcaggagctatccccacggcggagggagggagggagggagggaagaaggaggaggagcaaaagcttaccggaggggcgcagggcgctggcacggcggcggaggaggtggtggtggtggagaggctactgcaagctgctgctacgaggaagcggcggcggagaaggccgcgagacgcgaggggagaggagagagagagagagagagagagagaggctactgcaagctgctgctacgaggaagcggcggcggagaaggccgcgagacgcgaggggagaggagagagagagagagagagagagagagaggagaggagaggcggagttcaatgctggcgccgcatgatgcgggtggtggcggtgattgccgtacgccgtagggaggggacgggaggtggactccagctcgaccttgcctatcgtgagacggtctcgcttcgcaaccagccgttcccccgttccgtctagccactccggtgtttgcttggtaagccagtcgcttttctagttccatacatttaaattttatgcagcgaaaccaactgtatcgtgtacttattattattaacactataactgatatcgataaaatttttttagactatcaaactaagagttcataaaataaattataaacttcttatacattaaccaatacataataatcgataataattgaacatatattcatgaacgaactaaaatcgctgaacacacgtgactactccaaaatccacaggctattgtctctttttccatcgcttctctcccttatctttctctatctatctaaactgcatcatgttctcaaaagaagagaagacgaaggtgtgtcttggatctggattagtgtggcttaactacacatttacgaggaagcgttggtaaaggtgggtaggcgaaaaacaccatgacacaaagaggcggaattcaatgctaacttatgatgtggaatgacgcattaatcgtcatacaatataaggagaggggaggtgaacccagctcaaccaaatcatcaggagccctaatacgatcatgcaaccaaacaaccaaaatattccatattgctcgattcacaccattggtatgcttgtcacgagctcatctctagatatgtcactgtaccatcttccatcttccagtatacgtctttattacgacaacctccaaccatttcaaatacatgccactacatctggttaatcgctaaaaaatcatattagaactagatagtgatagatttgtgagccatatcatttaatttacgagacaacgttttcagttatcactactactttttctaagtattataactaccgtgaataaagttttattttacatatcttctatggtgcataaaattttttcaataataaaaaaaatatttgtgtggcaaccaattgtcgacgtttgatatcgcgactatggtattttgcatagtatggagatcattggtacaagggtatatgcgagattgaggtaaaacagatggagacaaggatttttatacaggtccaggccccttatttgacaggtaatagccctactactgttggttgaagccggtgtttcttatttatcataatcacaccggtacaataattgagataacttatctagctattgtcgacttaacggcatggataaccaactcgtagtcgacgacagggtaatcttcttcctcgagtccatactcggcgagatcagagatagcgctagatctctcttgttggcctccgcagatactatattgggtttgtctaggcttatctctgatatcgatatccggcggcttgtcttgacgtgtgttggcttgtattgatctatgttgatatgttgtgtcttgtggcttccctcctctcctcctagggaggcttgtatttatacccatagatgcccccttatccaagtggaactagagagaccaatatggatataatccgggtagtccttgtcgtttccatatagaactctattcgtccttcaatatacgaggtatgattccgtataagacatggtacatggtggaccatgccgagcttagtcaactaatattaggtatgtggtatccataaccatgacaccaatatagtagatattgcttggatagacatccgagtgaactaaaatctttggaccccacaaccactctatagtttattgagctatcggccattttccctcgttgcttctctctttgactctcttattgtttatatatttccatgaaacctccgtcactatcaacatctattcataactctttatatttccttccatatccttaaaatggatggaacgatagccgttggttgcactttgggtgagtgttgaccttgcgacaaccaagatatgatcgtgcgatgcaataatgggatcagcatggctcaatggtaaggaagtttgtgaccatccctcctctaggttaatatgtacaagctaactggaataatttttctctatctattattttctcgtaaactgtgtacttctataaagattgaatcaacttataaaaataataactatagagtatagaataagatacattgtttattagctaatatttaaaacaataaaatagtcagagcttttcttttaaatagtgtacttgtatatgttagacaagcatttcaagaaggaaaatctgagttcatgttccatttattttaccaaccaggtcttccatatcattttttttatgaaaatgaaaggattttgatacttgtcatgaggtacttgtggatgtatcacgacttatcgatcgtcataggtatataaacgtaaattgcgtcaatgttctacctaaaaatttagaataaccgtactacatattctacgtaataagagtaaggaggaacaaactaccattgcaacacctcgtgcagttctaaactatcccaatttcttttaaaggattgtgtaatccacactcttattaactttggaccattttgttttaaaagtggctccaacagatataatacattgtgacaaaaatcttatattgggatcatggttgttaagtcgtaaagttgagatcgagatacccctagactgacctgtcaaattggttgactagtcaattacttggtcatgcaaaaacagggatgcaatatatagtctttaccactgttatactatgctaagcaatacatgtagtattactgtagagtagaatgcaagatgataagttgataagaaataaaactgaagtactaaacacaataagccaattggtgaattggtgattttctacgactaatctatgactaaccatgactaatcgcatgacttgttatttggtcgagtcgtggttctctagtcgacttgcttgatcgactttactattaatcgcaactagctgggtgacttgataacaatggttgggatgtatggagatttctctatttgacccaatcaaaccaagttcagcttataatggaagatactatggtatgtgtgatggagccaacgacacaccattgagcccagttaactaatatcatttcccataattgattacttttttcatacatcaataataaacaatagagaaccggtagcaaaaaaaatgtaaggatgtaatccgagcggccatccgacctagcaggaggtggctccgccactagtattagaaaaacagaagagtttatttttattttttgtgcacattgaattcaattttattccatatccctgcatagttaagggtgtgtttggatggatattatggcggcttgtattttgtgggtgatggtgggtgggagtgggatagggcggcccagagagaaatattccccttagataccgtatggagggatccggacgatttgcccagacgcagccaactgagcgccctaacggatggagggatctttctgtttttctccctttcccccttttatgtgcgtgtgatttttttatttctctttagaattttgtttgtttgtaatagattggtacttttgtcggccttgtgaatttgaagggggtatactcaccacctgtattcaattgcaaccattcatctatcatactctctctaaccaaaacaaatggatcaccgaaccgaccttcattcttacaagtaaaaaaaaaatcttagatagccatcttcactcaactaaaaaaataaggcgccatattccttttcagttaaatgcatgttacatttgtcggtaatatgtgagccgaagtcacgtaacttcgactgcagatgatcctgattcgaaccagacgtgccctaaactcctgaataatcattattataagaaaagaaaaaaaagaattcctagaaaccggggccatttctagcggagaggaggcagggtccccggggtccacccatacgccacaggggaatctgcccacacccacaccaccgtccccttcctccttcaccccgcccccgccgcttcctcctcccctccaccgccccacgcccccccagatcccccaaccccattattaacccaccgacccccgcgcgcgccactggatctcgcctcgatcgcggcggtggcggtggggaggggagcgcaccgcctgcccagccatgagatggtatgcttcgctagcctgaggagggctctgcctctgctgctgcgcgccaccaccaccaccaccccccgcttccttctccccagggccctctccggcggcgttggcggcggggcggcggtggatgcgcgcgcgcttctccgtgggcacagcgggtggcgcgggctccgggtggccgccaggatgatgctcgactcctccgactccgccgccgctgcggggcagatgcagccgcagcagcgtgcggcgggggccgtcgcctgcagcgcgcaggacggtggtgccgcagggtacgccagcggcgggtgggcgaggtaataatgataataataataataataatgaataatgcgtgtctttacactttcatggttattatagctctatgtatctgtttcgatcctaaaccatctcgttttcgcctctagtgtgaaatgaaccgtgttggcatttgaatgtggtcctttgcgctggggaattggtttggtttgttcagttgtcctgtggtggtagccaattagcatgaagaaacctgctaggccccaaatatgaaggatgcaaatgtagcagatattctgattgctattaatggcttagtggattggttctgcatgatattattcgcgcctgtacaattttgtgaaatagttaatgcgtgaaaagcttatcgtaaaacagtaatgctctaaaaggtggtaattgcgtgctcagcactattctttgcttatagataacaatcttccatttttgtggcaatgtgccgatgcgtatggatgatttttatgtagataccggaagtagtatatacatatgcaatgagttaggggctgtttgattttaagccctaagctgacaaaccaaagtttggcaatgcacatgcttttttgtcctccatttggctggtgaccacaatttgtgtgccctctctatttggcaaaggtaggcaataatttgtgtgctctctctatttggcaaaggtaggcaatagacttaccaaacttttggggacaaaatttgaatggcaatatctgaccaaattttggtggcttagcctatctccatgcccatataaaaaaatattggtaaaaccaaaacatgtttttttgctacttttttctctaggcacacatttagtcacggttattagatttcaattggacttatagatgatatatatatataattatagaagaccttagttttgtatgatgcacaacaagggcgaggtatgaacccatgatggcataaaaatccattgcctagtaagatttaagaatgtgccagcttttgaatttatgattataaagatttaagtacaagagaggaggccctattggacatatgagcttagttccaagaagatcgttatgagtggatttttacagcggatgaagaaacatggtatttgccatactaaagtttataaaccgaagagtatcccaatcacccaaacaaccaaacaatacttgtttgaatatccaccataaaaagtttggttcactttcatgccacaaaaaatgttgaagccatctcagatcagacatatcactttgttcccttccatccaaactcctgactcactaatgttgactcatgcctaggccatgttccatctagtctactacctaaacccagtcgttctgtgctcctttggtccttccccagaattctgttcctgcatcatcttcacagttaatgtcctgcaggtatgatgtttgtgtacccactcaaaattataaggacataattactcctaagagaccaaatataggactacatacatgattaaatagctaatacacgatcttcctcataatatcgcctgctgcattcatcagccaaaatgagcaaagctcactgaaatccttagctcctgtctttaacatactcaaactgggaagttagtggccatggcagcatgactggagcgataggttgtgcctcttacatatggttgcgatggagtcactatctcagcatggaagagcacagtgagggtgaaatcatttgatatgacactgattctcacttagcagggagggcgcagtgatgtgcttgtagatggacatggcattttggagattgcggggtactaggagtaagaaagtaggtaatgcagtggctcaagagacaagcggagcttcagtgaagaaagagtgtagggaggagcaggtctggttgagccattaaatatgatgggggcctggtgataagttgccatcagagactttggatggaagataccatagtggtatcagagagttgcgaagctttggttgtttttggtgaactagactttttatggtatttatgaaaaacaaaaacatttcgggctccttggaagttgaatgctgaaatttcacaggagtttcatagaggcagtttacatccaacaggaatcaggaaaaaaaattccatgttcaaaggagaccttaggttatatacttgatgttctccttaaaaagccatgcaaatagggatggataatgagcaagtttggctcgttagacttggctggtcaggttcattatgataaggagccaacttggatcagctcattaaccttaacgagctaaaagactggctcggcttattttgctaacttgagctggctcgttagcaagctagaaatgttcaaacatgtcatgtacaatttaatatttaccaatttatcatatattagcaaaatagtagcaccaagttatcatatattagtaaaatatttattaaatataaaaggatatgaagtaattctgacattaagtaatacaaatagaatggtcttttatacaaacatgcttaatgagtagcttgcaaactggctggcttggtattggctgattaagctaacgagctaaacagccagtttggcttggcttgtttagaacatgagttcaagctgaactggtccacgagctttgagcgttttgttcacccctacatgggaactccaaaaagggtacatatgcaacatgcccttaggggcatgctattgtacaagtaggtcaattgattagtgttgtcaagaaaagtaggctcctatttacatgattgcatcacagccatatggtactagtggcgctcaaatatatgttttcttaactttggatatacattgagcaccaaaagaggtgtaagcaagttacttttgaccaaactatgcaccttttttaggaaactgtcagtcatacatttcaagcaaaccagtactttatgccataatttatgtgattcccatacttttgtattgaccttttctttctcaattttggtaaagaatttgagcacttgacctagtcctgcattaataagaagactgaattgtgcgatggatcccattccttggaatatgaagtagttctataagtctgtgcttacacaatcatgatggcctcttattctagttttttcctgcatcctattttgactgccttaaaggcttaaacataccatgtttgttcaacatgcaatcatgaccgaatatatcagagtttacaatgtgatctcttttgctggaatatgggacaattaattttatctccaatgtttaaatttccatctctttacaagaatcattcattctctttggactcattatttgacatgctaccttggttaacgtaatgtccgaaaaatttgtgacagagaagatggtaaactgaaatgtggatattcaagttttagagggaagagagccaccatggaggatttctatgatgtaaagttaactgaaatcgatggacaggctgttagcctatttggtgtatttgatggtatggtttccatctttccttgtctactttcgtgattccgtgcccaccatgtttttcttttgaagatttggtgcattaggtcatggaggaccacgtgctgctgagtatttgaaggaaaatttgttcgaaaatcttctgaaacaccctgagttcctgacagatacaaagcttgccataagtaatttttctctttgattcttacctttccagttctctgttcaccttttttttaaaggttgctaatgattattatcttctcaacttttgaaaaaaaaatcaaaacataacaacaggtgaaacatatcagaaaacagatacagatttcttagaatcagaatccaatgccttcagggatgatggttcaacagcttccactgcagttttggtgggtggccatctatatgtagcaaatgttggtgattcccgtgctgttgtttcaaaagctggtaaaggtatgtaacaacacatgcttgttggatgtagtttttcatctgaacaaccacttggattcttatcattgatatctgcttaatgtttctaaatttcccagcattgatgtttttgttgaagaagtttggtacctaatgtctcatataaaccccccttggcccttctgctaacgattatttcctgtaccataatttaaggctagtgacaagggttgcttattttctagacattctggatctgatatctaggtgggatctgaattggtaacttaattactgaactcttgaaagaactaagtttacctgcatggtgctgtttctaatttgcttgggcatgtttggtttcccttcccaacctggctagccttggttcactctacaaaagtgcacatgggagtccggtttcaatactttctagtttttttattcagtttatatttgtcttccccacccatccattaacacctaaagtgcccatgggactcctgtttcaatattttctagttttttttattcagtttatatttgtcttccatacccatccattaacacctaaagattttcacttattcgttttttctagctatggcactgtcagaagatcacaaacctaacaggagtgatgagcggaagagaattgaaaatgcaggaggagttgtcatttgggctggtaagctaaatcttcattcttggatgcactgggcatagtttgcctttgtaagctcacatggacaaggcaggttgcacaaggcttgtccatttggtgccttctgatctccttgtagtttatgttaggttctctatgtcatacctgggttgtttagcattgcagccttatttacctaaaatcatgccatctctgtatatatttttctgtttgttttttaaaagtgagtttattcccaggtacttggagggtaggaggtgtactggcaatgtcgcgtgcatttggcaatcgtctactgaagccatttgtggtggcagagcctgaaattcaggtatcttattgcacttaatcatgctatgatttgtaggcctcattttatgtagtttaacctactctagttaaaggcttagcctagtctagatgaaagtcagaataggaggtatttgcagttcaacttgtctctttgtatgactcctctgctgtataattctgatcatgaccatatagcttgtgtgtgaagcttgattaatgtcttaagaaattacaggaagaacttgtcaatgaagacttggaatgcctcgttcttgctagcgatggactttgggatgtcgtggaaaatgaggtaataaaccaccaagcacattatctcaacctgaaaacgattcgaatttctcaatgaaaccactgctgcttatgtagcattgaacaaagcatcactttattgtcttctctgtctgatctgggtatacatttttaatgattgctaaattctctgataattctgtttaccaaaataggaagctgtttcccttgcgaaaacagaagacctgcctgagtcggtggctaggaaactcacggaaatagcctattctcgaggcagcgctgacaacattacatgcatcgtggtgcaatttcaccatgataaaactgaataataagatgggactagagctgatgaaaggttgaaggtttttctacttcaagctactttccagcagtccaaccacagagggggttccccaggagatgttgctcctgtagcatttgctaaggattgtttcgttgattcttttccttgtgtaggaatcattttttgttttcagaggtgttacgaacagaaaattttatttcgagtgtaacacacagttttaattggatggatactaataaatcaattgcttgtttacctaattacctgccattacgggcatggcatataattctcgatgatatatagttcttttttggcaatagtagggtacataggtctgtttaatgttttgcatggtccgaatttcaacaagcttaatgttgattctgggccgaacttgtgtggatcatttggtccatttaacgttagtgacgggccaaatttaactatgctcatatgcataataacttatcaatagccgaagcaaagcgatacaacaattgcggtttagcgtacaccccaatgataaaatggtgagattaggcccgcaaacaacattatttggcctaagcttgttgtaactaaatttagcccaccctcacattaaccgggtagaattaagcactgttaacacaggccggatttactcattaaacaatctgaagctggttaaaacaggccctaaaactgctaaatcagacggacaaatgacgattaccgtcctagttaaacatgccgaatttagctaacttcggcttaatcgtaagtttactgggccgcttaatcgtaagtttactgggccggagacaccagtcaccttagagcactgatcacacgcatgaacacaatgatttcagagaaaaaaaacctttcagtacaggcaagatttcagagaagcttgtgtatcagatacaaactgtcatactctggaccatatcttctccggtcgagaggatagctatgtaggagtaactccaaaatcaagatgcaatagtctacagaaagaacagtccaacgaaggattacaatctttttctttaacaattggcattttctagtgctctgagctgtatcttttatgcgttattgcatttcctgttggccatgaacaaaagcaacaacactcaaaagtacaaaaaaaaaaaaaagagttcagtgataacacacaggagaacaaggccagacataacaagacaggaaaacaatgttacttctcaatgaaaataaccaagcacttgcccgcccacattctgcttaattgcttcctcatgatccagtacaccatttggagttgtgatcacgacatagccccactgcatgacaaacagcgcactgagtcagcaataatacactatgtaaaataaggggtgtagaagtgataatgaattgagttacgacgataactcaatcacaaaaacgctaggtaacaccaattagttgcttaatattaatgaaagtgggcaaaaaaaaccatgtttttgcgagaaatcaaatttgccaatgtggcctatcaccctgaagggatagccaatggtccatggatcttatcatttgctttgttttctgaaagggactttgcatcagtgacacttaacaaacatgctagttataattcttctcatcatccatattctatcaattcagctccttaaaaatatttttcaaaatggattttacactgccatgttgaaagagtttgctgtgtcagaaaataattgcaacaaagaagatacagtacgatcgtgttaactacaaacatcaattatgaagttttctaaggaattaaatgttcatgatactaagatattgtaggctactgtctgatctagttaaatattttgttgctcctatacatgatttactttacatgattgacattacatacattccgttactttcaacaagagagtacataaaatatctagcatttaaaaccaagaacttataggaacttcagcttcttaattctccaagacactatttgcagtgtaaaaaaggataagaagaatagtccaacaactaactaaatatttcaatggtcacaaattagtagatggaatacctgccgtgttggaagcatccgaactctgtattgttctatttccttggctctaatatcctgcctataagtaagagccttacaatctttaatccttccatgaagctctacattgatttttccaactctatggggatcgatgacctcaaactttttaatgtaccctgtaaaatattaaaagcccaaatgtcagaaaaaaactagacaggcaacatatgtgggctaaacaaatggagggcaccgagcaatatcagaatatttccttttgtttttcgcatgaagaagccaaaatacaaggagaaaacaggcgagtcagtatgccaagtatcattttgttttccttgggtctgttatcggtttattgcggtgcataatttcaagtgaccggtgcaatgcaaacactcttgtgttagatgaaatgggtataagaagctcaagcacagaacgatctagggaatagcaaacaaatgcccgacctgacctgaccgattgaagagataaaaggatagtaggatatagcaaagcctaaacatcaagctaccaataaaacaaaaatctagcatcttaagaatatgcacactcgccttcattttccgatagcaatccacagtttcccacaataagaaatgacaatgctaactctaactcatcacatttcgtccatccagatgacgcaaatataagacacaaaaacaagtcaattatctaatctagccgtctaggtaccgaaagatcccaaaaatcgttcttagcatgaccatctcacttcgtgttcgtttctgtagtttcctccgtaaaacccaaaacccccaaaagtaaagcatcatccctcacaactaatccaaacatttgctatgctcggtgggtgggattacttgagtaaagactagtaaatcgcacattgaacccaacagactcctcccccgcccccacatgaatgaaaccctcgtgttcgacagtagtagaacagctcaagcagcagcagcagcaagcagtgcagactacgcgggcggaagcagtaggggcgctccgaaatgaagaggaagcccacctcggtgcttcatgatgttgaggaaggagaccatgacgccggagatgggctgcagcagcgccgtcgccttccccctccgctccgcgttcaccatcgtccgcagcgcgtcgttcaggatccgccgccccatcctctctctcctcgcctcgccgccgccgccgccgccgccgccggagcagatggagttctgcacccgcagcaagggcaacgcacgcacgcacacggccgcacgagtcgcgggctggaaaggaggtgttattcggcctaatgggccttgggcctttggggttacagatgagccttctagggttgctggtgggctttgtgttttctttgtttggaccttcggttatcttgtacttcctccgtcgtagaaaaagattaatttccgattataatgaaaaacatggtatatatccgaaattcgtagtttgtattttcctttttcgaaagcgttgcatgtagtgagtgatttttgatttttgatattcacaggtggaactcataatgcgtctcgttcttagaaacaatctcggtctaagatggaaaaattgccactctcaaactcgtttgaggttagtcaatctcgaggtcacatgtagggataaagtggacaatcccataaaccgtataaaaattcgtttactagtttatttttttatatggtagtataaattttagagaaaaagaattaaataaaaaatgggataagcgggataaaaaatcttgcttgcccgtgccgcttgcatccctaatcacatgtgttgacagaagcacgattgcttagggtagctccacggattgcacttgatagagttaactgagtatcattctcggttcaagccatcaatcaatagtgataactacgctccaagctgatcagttcatttaaaaatgaagatcactttcaatgcttgaactctacctcttaactgcctgaaaagtccccattttttctctcatccccctagatctcctcctcccattcattttgtagtttctctaaattttctccactaaaaaaaggaagcatgcatattatgggttctcccaagatacaatactatggcaatcgctattggttgatggcttgaaccatggtaagagaatgtaaatgttttggtaatgcaaacgtaaatgttttcccatcactctgtgaatggaaacagaacaagcgttaccgtgctttgtttggattcgagcagaagatcacttaccgtaatgttttccgaaaacacttgatatcggacggtaacgagtttgtattgggtccatatcgcttcccatggtacccgatcccgtcgtatgcaaagcaaggcccggtcctgccaatttagtggcccggagcgaagctagaaagatgagccctttaatacaactctgataatataatgatgtttctaataaatgcaaacaagttatatatctttctcctgtgctttctaaatctaagttcatatggtctatggacttctatatctatagcatacatatatgttgtgaggctccttaacttcgagggcctagtgcgatggcatagctcgacccccctagggctgggccttaagcaaacacataataacttgatcagattgcagtgcgaatagattgtggaagaaaactctccaaccaaacagcacctgagtaaaaccttttgcgcgaagtaaggtcgaacacataaggcattgctacgattgcgtaacctagcttattccataaaggtgcttgccttttagcgaaaacaactagtacatacacatgacatagcaaaatcatgctctctcaccaatgttaacaattatttttggagggaagatcatcaccaatgttaatatcaacatatcttaacactgaaagggacctaacacacacagtacaccggcctggttgaaagttcgaaggatgctgttccagctaccaactactatacctcgcattgggtgacatgaatatacatctctacaaggcacaaggtgattactagctcacaaggtgatcatcatcattctgtcccatcatgcctgttttctctctagccatcttgtggaatgctctttatttcactgtcaggccgtccttttcccccacaaaaagaaaataatgctggtggctccaccttttgtcatcactgatcagctctggtttctgttttattttgagcttttgataattgagtaggtgcaccctatgatggctggtttctgggacatgccaaattttgcatgcctcatcattattcacctcttttggtcattaaattagtcctcctctgtggtaaaagaaaaactactcccatatgtctgtcttatgtgcattattatcaggaagagaatatggaaaggttgttcttgataagtactctcctcattcctaaatataagaacctaatactcgatgggattgtctatatttgcagtattatgatatgtcccatctaatattatgttttttatatcttgggacgaagaaaatactaggtaaggagaaacttttgactctaaccatatatgtgtgacctgcgaccacacaatattgttaccatcaggaaaaaattagtatcatgtatatatggagaacattaatttatatgaatacatcttccctatgtctactctttgctaggaatgaccatttcaacttatctattgccaaagtgcaatcatccttaagtccaagcaacccatcgaatatcagaaaacccaacaacaaagaaacatattgattaagtattaacattgctaatgggactcaaaactgtggcaataaactgcacatatctatatagccattggcggacgcggctttaaaatatagatggggcggagaacggagattttcactcgataagagcaatcgaacacaacacatatcatattaacagtccattcacataactgcctcaatctattaggtgttcacatcttgttatacctaattttgatggcccatgactattataaggaggtaaaggggtcttgagggtgtggggcgacacgagtcatagctgagtcggtccaccactctgcctaatgggtggatccgcccctgtatatagccccctttatctgacgcagttaagctgttaaaactgcctatgcacacgaaaattaaagtagtgtgctaaaaatttgcatatccacttccactaaggcagaagtaataaacaatgactctccctaattaatttatcaagctagcactctacattaattatagccagttgcaattggccacatactttgtttaaaactgcatcctctttggaagcaattccttttgttgttcttgacacactagctaacaatcttcacttggcataccaaaatgataatgcttgatttgaataattaagctaagccagattaagactgcgacactgaagtgcaaagcaatggcaaaccggtcattacacggtttttgccgacaatagttattaccgattgtagttaattaattggtcatgtgaataaataattcttcgacacagtgatacataggaatccaaagattgaaatcaaaaagaagaagaagaagaagcaggtgatcattccataaactggtgttatctgttggcgattaattaagcataatcaggggcctgatggatgattactggttgtgcttttaccttattttttttaagtttgtcttctcagcaagagccttttcggccaccacacgcaacaaagcattcacaggtagctaggcctcgccggtcggcaacgcaaagagtcacaaattaaattcccttttagctcagacagagtaatacagtaatttcaaaagagctgaatagtattactctgatttcttttttttttaaaaaaataaagacagtagaagatctagtttttacatacctctagcgacctctgcatctgagatgcacaaattcatagttatactaaaattgatcagactataacaagtatgccctaggaaattgaaattaatgttgctttttaaaggtgtacaatactcttaacataacgattttatgggcttcatatattggaatacacaattggaaataaaaatgcacgaatagaatatcatggttgtggaataatatagggaatgaattcatattaatttctaaaaaatagagtttagtaatatcaaagataaatcatatgaacttcaagataatgaaggagataaaacatgaggtaagacctcatgctacctttcaataaaaatatcttatggaatagttccatccttggaattgaaaagagaactcaaatgaaatctgaaggatttccataagaattactttagttcctggagaaccaaaacaatttctcaagtttcaaagaagacataatcttttttttctatttttcttggttccaaagaaggcatataggtattcctcttacaaattgctatgtcaatcattgatttccttaagggcttattcggtttagagaggattggaggggattgagggtgaataattccacaccacaataggtgtggaataaatcccctccaatccctctatcacagggattaaccgaataagacctaaactgggcccgcacccaaatgacatgtagaaaatgtcttctcgtggcaatggctagatgaagcttaccacatgccactactcatccacaacaccgaaatttttgtgcggttctatgtagatgtgagttcaaagagtgcacttgacttcagtgctgcgtatgaatgtgcttgttcattaggaaaaataaaatatgctagaaaatcatacaaagtatcatgtggctagtttctacctcattatcgcaattgttatacacttctgtctttttcatcttttccttttgaaccctccatgcattggcccatttctttgtactctctgtctttttgtactcaacacatacttcggtccccagctcattgctaccagtggcaatgtagcatgacaaatcttggggtctcaggttcataacacaatggaggaattttcaaccttttctgctacccccccttcacataaaaagaaacaaaaacaaaaggaacagttactttttccccttctcatccaagtatatatgtaccaatcaacttttgcaatattgaaaacatcaattatttcggtatattgaacctaattatgtctaaaaatacacgagggcacttatttaggaagagaccttactacttatttcataattttcctttttcacaagagtgctggaatatcatttgtctcacaagaagaaatatttcagtccaagaagctatagaggatttgcaaagaaagtaacatgcataacccttttttatatggagatcatcattttaatggcatggagcatttagacctcaaggaacaacaagatattcagaaacacaaccccttcgactcaagtttgcaaagatatataagttcagaatagagtttgccttggtcacccatatatattttttagagaaggttttttttttacccagcctctatatccaatcgaatatatgcagcattttttttaaaaaccggaacttagctattccccttccttcccattccaaatctcatgtataaaagacgctccttgaccaatctttacctacttaaaacattggtagagtttttgtcttccatcaatcgaataatcatgatccttcatccaatagatctaacagcaagatccctactcctcgactcctgcccctcgctttccgtctccgccccccgcttcttcagttagttgatgagcataaaagaagccatatcggacatggagagagaaagaggagaactgatttgttgatgatcggactccaatcaccctaaacaaaatcagtattaccaaaggaaaaggaagagattgatcgattaatttcataggttgagttgatttgaacgcgatgggccgaggtcctgcaacgtgcggtggcaagagagctcttggttggtgccgactgctttgtgaggaggcaattgaggggaggtccggcagcggattcctatattgtcgatggatcttatcgatgttttgcatctttacaatgataagctatctaatgtgattattattattattgttgtaaaaacctgagataatatgtggtttaatatatttgtcttcacccattgcaacgcgcaggtattcttgctagtcgagtgtacggaagaagagaacaaaaatattaaaccaagttcaccatatcgtatcctgttgcaacgcacccagcagctagtttcttggaaaaaggtaagtgggtccggtgcaattgtgcaaatccccctccctctgtccctcaccggtgtgtggcctcgcttcccattggctccggcgccctcgattcgtacggtgaacggcaaggcacaccgcggcttaaacacagcgtttgctcggttgcaccggaaacctcacctcactctcctcagctagctgcttaattacttgcagctagctcagctgcccggaatggtggagatggacgccggcggccggccggagccaagtccaccgtcgggccagtgctcctccgccgtcaccatgcgcatcaacgcgcccgtccacctcgtaagtgctcaggctcacccatctgatctctccagtagcgccaaacctgtcaatctttcgatcggccggttaattaatttctcttctctgaaatttggttcttgcattgatttttgagacttcttgatcttggatgtgtgtttcttgggtctctctttgttttcactgataatgatgttgtatatgctagctcttgctggcagtttaccagcacacgctgaaacttcactgaaaacgaagattttccacgaaaaaaaatgaaataagtacacaagtggaagagaaaagtttgcagaagttcagaagaactgaacctaaaaaaataagtgttttttcccctcgagagttagctgaattttacaaatttaaatgaagcctctgttttagatatactcttctagtagctaatgaacaacaacaatggaaaatggatcaagtgtatgcgtatctgcaggtaattaaggtcttccagctgctatatatacattacgttgtaggttgttagatgcatcttgaagaaaaaacaagattcaaacaaatatgtgaaacaggctcgtcctttgtttgttcaaaagtttgatgagcctctgcattcaatgacaaattgataatagcaagaagaatatatgttttgtatgctaacagacctagagggatgtctgttaccatcctgttgctctttcttcgcaaaatccatattattataaagggaaagttttaagtgttttaatgagtatcattatagacaaagcacattgaaaagaacatcagctagaagtaattggtaagacaagaatcttactttttccttttttggcatgcacttatgtttcattaattgtagggacaagctagtccctctgtttcatccatatttcttgaatttacttatatatattatagagaaaatcccctgtgtatccctgaaagttcacctaatcccttctgtacctttgaattttgctcaatcccttaaatatccctgaattttagtttggatcctttccatgccctttccgctagttgactgttaaattcttatgaaaaagtccattttaccctttggtataaagaagcatataaattaatagagtatattgttgaagcatagaaatttgttatatgagactattatgtttatgagatagttatgcaccatattatttgcgataaatatacttttagatgtgatataaaaaattaatacttatttattagttattaatagatttttttagcatatgtgttctgatagtaataaataaatctgttgtattactatgaaaacacatatgctacataaaagaacttttaataactaataaataagtattaactttttatatcatatgtaaaagtaaatttgtcacaaataatatggtgcatcacatactcataaatataatagtctcatccaataaatttttacattctaacaatatacttcattaatttattatgtttcttcatagcaaagggcaaaatggactttttcaaaagaatttaacggtcaactaacagtcaactagcggaaagggcatggaagggatccaaactaaaattcaagggtatgtaagagattgagcaaaattcagggatatagaagggattaggtgaactttcatgggtacataggggattttctctatattatataatgcaatcagtcttacttttttttatcctgttgttttattaaaacgagatacaattagatatcggtattttttttaataaaacaagtataacttccaaactcgtgtaccaactagagctttaaaaatcatattaatccatatcaacatttgaattttagtgggttgagttatgcatccacaacttctgtaggaatgactgtaaattgtagatgattttgatcacttattctctagtccggtggccttagtctgatgtggttcttgtagatagacttaaatcatagaactaaatcaaaatgttagggatgaaacacttttttggtgtagtgcagttgtaggtgtatgattctgcccactacagttttactctccgtgctcatatttacacacacaagatcttgcgcttaataagtatgtaggaatcttgtttatttcactgttttatgtttgatttttatctttcagtttgttttagaggggtgcatttatgtgcatgtacagtggtgtagatgtgcgtcttcagtgtaataaagaaaataatcttacatcatatacccattgtaaggaaagggccttactcttgtaaactgccagatgtccatttttcatcaacaacatactgaaaaactatctaatttcacctcacaattatcaaaatatgtaatcagttgtaaataagattatattgtaccagacatcaaaataagaagtggaaggatgagaaaaagatattactgagctttgtcaaattgtaactaaagatggtcttcttccccaaaagtgaaattttctcttatcagttaaatgaatttgattcactaaaaaaattactgaatttaaatgtaccagtttgataccaacattttttttaactctgcttccaagattcctctgttggcagtttacgccatggtttcatatctcctcttcctaaccggccaaataaatcagattgcatctctagtcaatgccttccagctgctatgcatactgtgaaagttttctgaatccatctgaagccaaacatgtttgtaatgttatgcagttgtttcagctgctagcctgctaccatcctaatttgtctatttgaacggcagaattattcaacaaatgtgtcaagcaggcatatcgatcccgatgttccacttttctgaacattagctaaagcagaaaggacagtctgtgttttcgtttatttccacttcattgaataccttataatggataacctggctgctgcgtcaaagacgcacaaagcatagcatgacacatatcattacaataattccacaccaagaagaataatatgcatgaccccactaacttgtttctgatgatagtttaggtgtttcatttttggcaaattctaatagcccaccaagaagaataacttgcatgagcccaccaagttgtttctatcttcataaccagatgcatgagaatcttacttttatttctttctttttggaaatgtttttatctttcattcattaattaagctttgaacataccagctggtgggtctaccaatattttgcagtagaaattagtagtcaaagttacatctcaaatcaataccgtgtggatgttcaaaacaacatctttaaccacaagagtacctatctgactgaaaaaaaatactacatctgtcccattataagtgcagttgtgggtttacgtgtccaattttgattgtctgtcttatttaaaaatttatgaaaaataaaaaaaatattagtcatatataaaatactattcatgttttatcatctaataacaataaaaatactaatcataaaaaaatttcaaataagacagacggtcaaatgttgaatataaacagtgtaaaaccataatttttctaggatggaggtagtaagttatcgtctgcactagagcactaggagggagtttttaagagggattgaaagtttagaggaatgagactattaagtgttttgtttggttgggagacatagaaattttggtgggataaggatggggaattgagaaggaactctctccttttcaatacctgtgtaggggcatccgggcatgtaattgggagggaattcctcctttactttgtctaagcaaatctcagccatccgtttttattgatgacctaatcaccaactaaactccctgtcaatttctatcacctccaccaaacaagatattgaaattaaaaataaaatgtccatcttaatctcatcatcaattccctcgttgaaacttccaattcccttcactcgagttaccaaacaagccgtagaatttcctggcggattgaagttttttttttttggcttccggtcacttgcaggtttggtccatagtgagaagatttgaagagccacacatcttccagcccttcgtgcgcggctgcacgatgcgagggagtactagtctcgccgttggttgtgtgcgagaggttgatttcaagtcgggcttccctgccaagagcagtgtagaaaggcttgagatccttgacgacaaggagcacgtcttcggtgtcaggatcattggaggtgaccataggctcaaggtatgctcgttcatatctcagaggcctgtttgatttgtcactaaacgaattctacaaccaagatttgacgttattgacttttggtaagtttgctaaatatttcgtattaccaaaatttatgtttttactttttttttctttcccccctgatgtaagactctcctttttccttctaatataaccagcaattctcttaccatctactataaatttttttttgttgaagtaacgttcggtttaaagcctcattaaattttggtgtggttttaaattccacctactttctaaggatctgtttggttgagctcgtagaagctacagcttctccaagaatcaaaagttcttctaaatactttagatttttatctagattttaaaaagtagttatagaatcaagaaaataaactagaagccagaagctggttttccgacttctccttattctcactagttgcttatctgaatccaaagctctctatacagggccttaacatctgtgtatattttaggctagaggcagtacatattttgtctggtgtatatcaaaatttggtaggttgaatttatcaacaaaccaagctgtctccatattttttgatgacatagaaaattaatcagtttgatcatggatggccaacctaaagcaaaaaaaaaaaggagtagctaggtagtattccctccgttccatatgataagtggtttgacctttttttctagtcaaactttgttaagattgatcaagtttatggaaaaatttagcaatatataaaatattagattaatttcattagatctaacattgaatatatttttttaatagtttgttttgcgttgaaaacactactatattttttgaaaacttattcaaatttgaagaggtttgactaaaaaaaagtaaataacttataatatgaaatggatggagtaatatttgttacagaaatggttcaaactaacaaatagaatccgacagacacatttgcggagtagaatttgtgttctaaaaatgggcgaacatgttcactaatattcatggtaaacatgttcatccctttagtcctacataataagacatactccatccattaaaaaaaattaattctatatgtgtccagatttatctttaaatgaattttttttggacggagggagtactttttttcctcacattgaaaaatattacacatacaaaaaatcttgcaccccacaagctcacccaattaagcgtataatttccactttcaagtttcaatatgactcacaccatagtgaaaaatattacacaatgttgcagtacagtaattcttctcggtttattttttttttgtgacaagagtcaaagtaatgtggaaatcctcgaaaaaaaaatagtaacgtggaaatctcctagaaaagcctgatcagtatatgaaaagatagaacgaatgctttcccatcctggtgttgtcgtgcttgtgtaggttaggccaactactgtctactggctggctgaccacaaacataaattaattaattaactgatgatcccatgcttaattaattttttaatagttaaaaaggtttgtatctccaatctctgcttttgagactatttatattctgcagaattactcgtcagtgttgacggccaagcccgaggtcatcgacggcgagccggcgacgctggtgtcggagtccttcgtcgtcgacgtccccgaagggaacaccgccgacgagacgcgccacttcgtcgagttcctcatccggtgcaacctcaggtcactcgcgatggtttctcaacgtctcctgcttgcccagggggatctcgccgagcctcctgcacaatgactggattttagaccagacattaattggagggttttttttttttgcattgttggcttgttgccatttgcatagcagcagcaaaattggggtaatcccagaagtatacatattcttttacgtgatgctaggtgaggaaggttactactgtaatatcgtcgtcgagatatatgttagagtgcgtgacccaatccaccaatcatgggtcattaaggtcacattagactggcaacatcacatgttcaaccagaaccataactttactttataggtatacacaactcgaaaaactagacttgtagatatggatcaggctactcctatttaaattaccaaaatgaaactaaacttaacaatctcctctttcacacattaggtccaacaatctactcatttacatcaactcatatgatcacaaagacttgtctgtgagctatgcttaacaatctctctcgtcatatcagagcccatacgaccctaattaaagacttgttaatatcattccctatcatatcaacccatatgacatcgaaaatttatttacgcgccatgcctaccatcaatctatcatattgtattagagctcatacaaccccagagacttgttctgagctcccccataacctcgtgaccctaggaaattgatccacgtttctaaactccagttctgataccacttgttttattgcaaagctcgttccactaaatgtggtccttccaaatcacattgggtctaatacaccaataaatctaaccacatgcacaactttagatcatatatttacacaacccaaaaggttattatgaggtgtgagaatttataatttccaccttttaagttatgctttctcatcatcaaatacttatataagaataaatctaacaaaatatagttataatcctttatattttaccaaacttgggtatagaatgatatatgaaacatgtttagattgctaccttgacatgccaaaatttagcataaggtgtgtttagtttttttgtgtaaagtttttgaagtatacagacacacatttgatgtattaaacgtagactaataacaaaacaaattacatatttcgcctgtaaactgcgagacaaatttattaagcctaattaatccatcattagcaaatgtttactgtagcatcacattgtcaaattatgacgtaattaggcttaaaagattcgtctcgcaatttacatgcaaactgtgcaattggttttttcccccacatttaataccccatgtatgtgtccaaatatttgatgtgacgtttttgaccaatttttttttaggatctaaacaatgcctaactggaaagatcgtagcggatcaaacagcaacatctatccctgacagtgtccccatgcatgcataatacgacataaatataattaatgcaccatttgactgtgcattgcgtaaataaattactttgtataattattttaagttctatattgtcaaccaatcgctctatatatataccttaatttgcgatagtcaactcgattgcgatgcccgtggtgtggtaccagcgtggtcactacattggattggacaacactttaggtccatgaattattactgtgaaagtgttttgacaaacagtaataagtcattagttttgtcaaatgggatgaaatgaagccatttattgcatagtccaaattaggcccacacttctacgttaaatgggctgaaattaggtcgacccgatcgaatgtaaaatggaaaaagtatactttgactccctcaagtatcgcccgagtatgattcatgtcctccaaccacaaaaccgggtatatcgactcctctaactatcaaaaccggtgcaaacaatacccctcagtggttttggaggacgtggcgcctacatggcggtcttgactaagtctttgtccaacgtggcgcttacgtggcactagaataaaaccaaaaataaaaaatatgtgggacccatacgtcattcacacgaagaagtactgtggaaccactgacatgtgggacccacatgtcatcctccctctcctcccctctctccgttatctctctcccccggcctttctgttcactgcggcggggacgacagtggggagcggcggtcgggacaaccgcggtggggagcgggcggtggtggcggtggggacgaggcggtggggaaatgaagccatttattacatagccgagatcggtgttgtccctgctcacctctaacatggccgcggtcttcttggggctcgggtactccgcggagcttgggcgccgccgtttcttgccctttttcattgcaatcatggcgcaaagaagcacggccatgaacgatccggcggtagccgcaccgaatgaatccaacaagctgatgttgtcacgttgcagtccgtcgccggtggccgcggcactctgcatcgggggagcggtggagctgttcttgccaggtccgtgaaagaagaggaggtgggacccctggcacttgcggtggagaacctcgccccagagctctggattgcgaacgcggcggcgcccatctgcgccatgacgggggtgatcgacacaatactcttttttttaatgacatatgggtcccacattttttaaaaattttattctaatgacacgtaagcgccacgtaggacaaagacttgtcaagaccgccacatcaaccaaaaccatctccaaaaccacagagggatattgtttgcaccggttttgatggttggaggagtggatttacccggttttatggttggaggatatgaatcatacttgggtgacagttgagggagtcaaagtatactttttccatgtaaaattaattaagcctcccacgagataaaatgggtcgtaaattgacaaattaattaggcccatttcaaagttccaacgattaataagctggatttaggcctattgatgggctaaattagaccactcaaatcgcgcaagtttcaactttcagttcagaaagggctttgtgttcaacatgcgcggtcgcccactcccacggtcatctacatctaagcatgtggatctccctccactcgttttctgcgtgcataattcccaaactgccgatgtgttctttaaaaaaagtttctatacgaaagttacttaaaaaaatcatattgttctatttttttaaaaaaatagataatatttaattaatcacgcaccaatagaccgttttattttccgtgtgcaattcgcttgtcggtaaccagcttcaacaaacacacactaaacaattaaacatgggagtccctattgcgaatttcctgcagtttacaaatccgttggatcgttttttcttaacaaaactcggaataaaaaaatggatgggattagtttacccaatcttttgatgatgatgctctttactataccgtagtaaaaaaatcaacagcgaaagcaacgagtgagagaaaggtgggtggtgcgccgcaagtgcatgcgccgcccaaaccggcctattggattggattttggcccggtcgtgctggaacaccaacacatactttgctttatacttggccggctgatctagtgtccactgcattttgcacctgtcatgcgtacggtatatctttatgtttgtctccggattccactcaaatatatactgtctagctaggacgagattgtgatattttctaatacaacaaacttaaaattaaaagagaggggcatatctagattcattttattagaaaatatcatatccgatccgttgattttttataggacggagaaagtatgtactaccacttgaaaaaacaactttgtacatttttatactccaacactgattaattaccgtgcgacttagtaattcacaactaaatattaaatatatatattttgttttcctttggaagcaccaattgtaattaaggtgtggtggagtcgtgttggtgggtacatacatgattttaaccattacgattattttttctatttttgtaagtattatacattcgataattaagattataacgaagcacagacaaatattatagtcgcacgtacgaatacgttttcggtggaatcctgatgtagtcgggtatctgatgacgctagtctctttaaccatatcttaggagatgcattgatcatgtccgatgcgcgcactcgtagaattaaaaaataaatctcttgttttaagaaaagatgaatttgcaggagaggggttgacattattcaaaaagaaaaagactcaattattctcgaacttgttgaataattaaattggtcgaacaacaaccttttatccctgcacagcttatccggagtatcgtaccttatcatgtatccagcatgtgtccctacttatctcgcatggatgcggtttctcatgcggagataaaggtaccaaaggaaaaaaaatagcataaatgagcatagtacattatattatattatattatcagtatgtaatgcttaccttagctacaggattagtacgaaggcaccaaagtactggatccatctatgtttctcctggaattcgttatgcacggtcgtgctgatgtcaatcagtcaatgtgtgccagccaacaccatctgctaattcactataattcagtctataacgtgtgctcctacaattttttttctttactattatatttcagtttcaatatcagtatattacttttacgcacaaaagaaatgttggtttcatataactatccttcaaaaatgtattaactctgtttttaaaaatatatatatatgatgcatttgacttttagacatatcgttgactatttattttatttaaaattttgtgcatatatctaaaaatataaaccgtgcatgcttaattaaagtacaatagtagcggcagacaatccccgtcgacataaataccagttagattagattaccccgcaataactgaaaaatattttacaaaataccatgtaattgccagatattttagtttcaaacccctccattggaattaactagttttcatgtataaggtagtgctgggggtaaaataaaagctataaattaatgtataagtgacgctaaaacttaacccacatggaaatttcaaaaactcacctacttaaccacaagccagctgaaacttttataccatatttttcctcaagctcataataacacaattgttgccatcccaaccttataattttattttatttttttggcaagactttccctgaaccaggaaaattaaagtaaacctctatatatatatatatacatatatatatatatatatacatatatacatatacatatacatatacatatacatatacatatatacatatacatatatatacatatacatacatacatatatacatatatacatatacatatacatatacatatatacatatatatacatatatacatatatatatatatatacatatatacatatacatatacatatatacgtatatatatatatacatatatacatatatacgtatatatatacatacatacatatatatatatacatacatacatacatatatatatatatatatatatatatatatatatatatatatatatatatatatatatatatatacatatacatacatacatatatatacatatacatacatacatatatatatatacatatatatatataaatagaacaaataaagtcagaagaaccaagagaagaaatccaaaagttagataaggtattaagtgaggaagagcaatgggaagtaaatgagaaattattactagagagttatgaagaagaaaacaacctgatagaggaaatagagaatatagaagaagaagataatgcagaacaatataatgattttatagactcattggatgaggaaggtttgcataatctagataatgcaatggaagctatggaagtagatttgggaacaggaaaaaggaaaagatacggagagggttctgtaaaaaatgaaggagaaagagaaagaccagccagggcagcaggaagatggcctccagaaaaagaagaatattcatatcattatatcccaggacagtataggcacatgggcactaaaagaagagattttgagaaaccaataaaatttcaaaatcaaaaaagtgatggggctatactaaatctagcagcacatgatcccatagactggccaaatatcattagtatttggaaggggttaatagttcaaaaatacatacaaaatcagcataatatagggaataaggtggaggatatgataacttatttagaaacatttttgggtgaatctgctaaagtcctatgggaacaatgggttgaaaagaatcctaataactatgaagagctaaaaagagcaggaagtaatcctcacaactttgcaaatatagtatctaatattatcatagctgaagacccagaattaggatatataaccctgcaaaatgaaagattaaaagaaatagaaaaattaactttaacaagctggaaaggtataaaggaattttctcaacattatctatataatgcaacaactgctaagcaaggatacaataagggaatagttgagcgatattttaataaactacctgacccattaggtagtatgatttttgaggaatataaaaaggaaactgaaggagctgaaattaatatttcccaagccataaccttcgtgttcaaacaattaagaaaaatatgcacaggaatacaagcccaaaggtcaatgaaacattctgattataatttttgcaataaaataatacaaatacctttatcatatggagaagataggcctagaaataaaagaaaccatagatatcaaagtagaaatagcaataatataaagacaaagaaaaggtacttcttaagaagatcagataatagagcacctttcttacataaacgaaatgtaagaagatataacccaaagaaaacttatgataagacatgcagatgtttcatatgtaattcaccagatcatttaagtagaacttgcccaaataaagatcaaaaaagatattctagtaaatatgaagaacaagagagagttttaattatagatagcgtaaatgaaaatatattagtatgtgatgatgaaataaaagatgacgaatcaatatattctatcatagaaacagatgaaattgaaaacaccaatgaagagtatgaatcaaccgatgaagagttagatttaattgacgaactagccggtttaaaaatagaattgatggatcagttaaattgtgaacatgattggattagaggaaaaggagattataacattaaatgtgctttttgcatctattacccaagccaagataatagagtaacctgtagtatatgcttaaaacaagcttgtgttgaatgtataaaagcaaataaacaaaaatggagaaaagagatagaattagaatcagatgaaaggatattatctagtagagtacgagttttagaaaacagaataaataaactagaagtggaactagagaatctaaaaattaactatgatattaaggcattaccagaaaataaggatatacaaaataccgaatttaaagagcaagtgataacattaaaagacagtaatactgctaaaataattcaactaaaagatgccataactaattttggaaataaatatatagtaaaactgcctttcaaagaaattttgggaataagaataccggtaaaagtaaaactatcacccaaggtatcatataaaattctagcactagtagacactgggtgtacaaaaaatattattcatgataagtacttcataaaatgtccagaaatagttcatacaattgatgataataaggcagaagtctctacagacatgtccggaataaagaaaattcataatcagctagctcataatgttgaagtatacattaatggaactaaatatataatagatgagattacaataagaaacttatccatgataagtgatgacatgataattggcctaaggtttttacaacaatcggtacaaaccacagtaatacatgagcaaggaattacttttatcccatatcaaaacaatgtgccatatatctcagaggtacgaaagcgtggtggagccagaatcaaacccaacaaccttgaagcactcaaccttgagtctgaagaaagaattaatgaatatgaacttagtgagaatatagacatctattatatatcaaattccaatatagagtgcataggattacaagcatttgcaccaaattggtatagggatattaagtctaaaaaggatatagaaaaaattgttcaaagattagaggatatccaaattataggagaaattcctatgaaatattgggagaaaaatgctatcgagtgtaaaattaatataataaacccagaatatattattaagaccagcccaatagaagcaactccgaaagatatagaagaatttaagatgcatatagaagaactgctgaaactaggagcaataagagagagtagaagtccacataggtctacagcatttatagtaagaaatcatgcggaagaagttataggtaaatctaggatggtcataaattataaaaggctaaatgataatactatagaagatgcctataatatcccaaataagcaagaatggattaataggatacaaggtagcaaatatttctcgaaatttgacttaaaagctgggttttggcaagtaaaaatggcagaagagtctatagaatggactgcattcacctgtccccagggacactatgaatggctagtaatgccactaggattaaaaaatgcacctgccctatttcaaagaaaaatgcaaaacatttttaacgataatcaagaatttgtgttagtatatatagatgacttgttaatattttcaaaaacttataaggatcatattgctcacctagaattattttttagaaaggttgagcaaaatggtttaatcctatcaaaaaagaagatggagatatgcaaagaaaaagttaacttccttggacatgaaataggagaaggcaaaattcatttgcaagaacatattgctaagaaaattttacaatttcctgatgctatgaatgacaaaaagaaattacagcaattcctaggacttgtaaattatgctagaaatcacatcaacaatttagcaaagctagcaggacctttatacgctaaattaagaaaaaatggtcagaaatattttaattctgaagacattaaattagtaagattaataaaagaaaaagtgaaagaactaaaacctctagaattaccattagaagaaagttactttatcattgaaaccgatgcatcacaacaaggttggggtgctatattaaagcaaagacctactaaattttccgctaaatcagaagaaaaaatatgtaggtatgcttctggaagttataaattaaaaactgtcaataatacagatagagagatcatggcaattatcaatgcaattaatgcctttaggttatacctagggtttaaagaattcacggttagaactgattgtgaagccatctgtagatattataaccagcttaatagcaagaaaagctcaactagaagatggattttatttgaagatattattacaggaaatggttatagagttatatttgaacatattaaggggaaagataatagtttacctgacatgctttctcgtttaaccatatttcaggtatgaaaagatcaatgaattacgccggagtcgagtgcttcacatttggagatgacaacaaactcagaatattcccaccaaattcatataaatttaagccaaaggaccatataatcctagatgaagttcaagagtgcatcttggataatttctggtaccaatacaataataaaagggaagaaaaagggtatttgttatcaatattgaatagcctctctgaatatttttacctaataaatgggtcattaatgcctgccaatgaagatcatgaagtaatccaacaaaagcctatatatgtagtatttgatggaaagctccctggggtctacatttcttttgaagaaattgtggctcaaaaaatagatgctaaattaatgggaggaatatcttggaagaaatataaggatattgatgaagcattaagccaagctagaaaaatattaggaataaattattatctagagcctgctgcaaaagaatatattcaaaaatgcaaaaaagctaaaggaaagaagacttcagaaatacccattaagatgactataaaagaagaagggttttttaaaaaacccacatacaaggaatgcttaacaaaaggagtggatccattagatggggaatatattgattggaagataatagaaaaatttgaagaagcctccccacagttaaagaaggaattgaaggaagaaatacttaaagaattaaaacaagaaatggatcagaaatttgagcaaataaaaaaggcagtagatgagaaattagaagtttctttttctgatttggacacaatggatcttggtggccatgggcaaccagatgaataaattaatataagctaaatatgtttttcaatatatattgataatagaatatcaacaatttgggcgtggaagaagaataaaagaatgaagaataaaagaataaaagaaattcagaagattacccaagaaagaatccagaaggacaccctataaaggataaggggacaatatagggtgcggtgaatgacatatcactgtgaagagtaaaactttcggtggaaaggcctcgactttagccagctcccgtgaagatacagtagcgaagagataagcaggaggcacaggcgacgccatccctggcctctataaaaggagacgttggccttcactccggagacacaacaacaacgaagacaccattcagagcaaagcttccaagcgcgctctcaccctccattccaccgttcttagtagtagtgactttagcctaccttgcatagtatattgaagcaaggagttgtgtaatagcgctgtgtaaggtaagaacagcttgcttgtacctaccttcgggtttcccgaaagggaaaaccgtatgtaagcttatctgtttaatatgaagtaattttccttaagtattcctgcacgtttgttctagacaagtgtttatgctaaggaccctataggagaaacctcttcggtttgttctcgtttttagcctgcatcttgcataggcgtctggagaatcggtatccgtagagaagtgttcccttcgggtggaactgcctggggagacgataaactcttagctagaacaagtgtgacttggaatatcttgttaagttgcttctaaaaagatagataggtgaggcttacggtgagtaccgagtaggactttacatcatccgaagcaagcttctgaggctgtctaaataggattcgccaccctgcaaagatcctaaagttaaaatatctctcgaagtgaacagtattgaacagtaatttaaacagtaaactgaatagtgtttttgaatagtaatcagccgaataaatagtgttttgaacagtgtatattgtctgaagcataggtttgtctgaagcataggtgtggtgtattttgtctgaagcataagtgtatatatatacatatatacatatacatatacatatacatatacatatacatatacatatatacatatacatatatatacatatacatatatacatatatatacatatatacatatatacatatatacatatacatatacatatatacatatatatacatatatatacatatacatatatacatatatacgtatatatacatatacatatacatatatacgtacatacatatatatatatacatacatacgtatatatatatatatacatacatacatacgtatatatatatatatatacatacatacatacatacatacatatatatatatacatacatacatacatacatatatatatatacatacatatatatatatatatatgtatatatatacatacatatatatatatatatatatatatatatatataacaatattgcaagttaatttgcaacgtcgtttgtcatgtagtaggtgaaggtgaagtccagtaaaatgaacgtattaaggtttgcatggttggctctactagttacacgcacgatctactggagaatgccaaaatgattttgtttcgttttccgttgtcgcctcgctggacgcaaggcttgttcttgtctacatcatgccatgtgatccgatgcctatccttattactactttatagtatgtgggaaatgctacaggtacatatatatatatctatcactctcacaaattctataaataagtgctttttttaaaagaaaaaactgtcgttgttcaccgcttgcttatgctttcgtatctgtaattagatattcaagccgaagaaaatcatgtgttagtcatataaagaaaacgtcatgtatatgaagcatctccttacactactgaataactgatcttttatcatggtataaaacacaaatatcttggatagactaagaaccgatattaaagatgtttttagtaccaggtctaaaagtccaagtccaaaaaacaactttaattttggttggtattaccaactggtattaaaaatgttatcagccaaaactaatgctggagaatctttaatctcagttggtactggttgataacaccaacacatactaaagatagttttagtaccagttgtcgtaatgaaccggtactaaagatgcatctagggttagttaaaaagaaagcatctctctaagttaagatgtgtgtagttgatgggatggttacacgcgtaagagctgagatgagagatcttgagttcaaatcccgtgtcccacatatttttggatttggtatgcatttttagttagtaccggttatttttagtctcgagttgtagagcccgatgactaatagtattttctaatgtcgattacattttacaatatcacttgcaggacatcagcagcaaagaccgatggccacccgactagttagcccaggagctaggtacgctgaaaaaaataccaagttacttgtggttgaactagtccacccggatttgtatcctagctttgatttgggtgctcacatttacggttaattattattttagtggtaagcgatatatcgacgtctatagtgactttgtcaatctcaaaatatgctggtccagtttttcagaggtgctcatgggaatagggtatgcgttcatatgggtgagtgtgcgtgcgttatgggcacatgtatttatactatgtttcttaaaaaaaataattagcaagcctttccttctttccttttattccccaacatagccctacctaggagagagccatgggctagagggcagtcaacggcgcaggccggtgccctgcctcaactgaattggaaaaaaggctgtggtagggtggttgctacctgaaattggccaagcagatgctgcctaattagctagctaccataacaaattaaccacacatgcattcatgtactacaagcgtatatatgcgtgcctagctaggacatggacattatattgttgaatttgctgatgcatcacgctcacatgcatgtctgttgcaacaacagtgatcaggataaactgaaagtggcttcacagggtccaggggacaacaagataagcttcttaatttgtacgtttctcagacagctcttggtggctatgtttattttaatgaatacaacatattttgaaccaggcctggattggtatgataatttttaggataattcttattgacaattaagttgtccaaatatgccctgaatggttttaagtatcactaggggtgcacaagtgagataagctagcactaattcctagttgcttcacgaagaatgatagaaaaaaaaattgtttcctgaagcattcgtaaacgaaattttctgaacatccaaaatggattttgagggggtgagtacagtggatacaatttaattatacgtacttccatcgttaatattttggaaaagagaagtccttccatctcatgagaatcttagtacacatgtatgttggttaattgccaagtgaactagtattgtttatgacaattataactaaaagggtctgtttcatgtgtgaattataaagcacacacaatgttttatttcatcacgatagggagtgatgtagatcgatgtgaaatgatgtagctaatagcaccattgcatcttgaaatggcattattcttccatttttgtcgttacttacctgtgactgcaaagctatttggcaatttttgtatggcgcataatgaagatctttattttctacaaaagaaaactctgttatgaaaactttagttcaatatggaattgaatattgctttcatcatcaactggaccatccctttgtacagtacttctattatatcatttcaagagtacatttttccttttcaaaaaagcttagcaaattaattaattgattttattttgaattagttataatgcttcttttagagaaaattgttattataagttttaccaaaaataccagctaaatattcatatttagctggtatttttctcaatattcatttttctctgtaaatagattatataaatcaaattaaaatcaatattcatttttctctgtagcataaatattcatatttcattaagcatagtatataaacatatgataaatgttttctcgttcgccttacggatgattacaacaagacaaaaatctcacatggcattttcaaagtattaatgtaactccatgttgaagtttttgctgccagtataaggctgcgtgtaccgattgatggatgaagatcatgattgccatttgcaaagtgtgatttcattgtcgagtggcattttgacatctcatacgaggtatatgcgtcctaccacgtgcttgtgctttcaagcaaagcttttacacacatcaaaagttttgttgccccttaaaatagatctctctttgggtggttccttgcaaccaccatgaatgttctcaatatatatttgctgaaactaaaggtgacttccatgttactatgtattgttcatatattaatcgtgacaactaccctagcccacaagaagagaagatgaggaaaaatgctaaaaacaaattatgggcagcgtatatagttacgtaagggggagctcggagtttgattaattaggaagtaataattttctaggcaaagttatagcctacctagcatttttcgaaagactagtaagtaatatgcaagtgcattataacgggatgtcgagatcatgccaatggaaatggagctaggtgtagatcatctaacctaaatcacactattttttatgcaacccccatttttttacgttaggggagagaactacttttacgtagtaaagacaataaaattgttatttctagctactgcaccaactagacgtatatctggcaagtttaatttgtgggtcacatttcgaatattatttctcaaaaaaaaagtaggcctagtttctagttacatatccatcttacaagaatcaattccaaccctctaaaaagatttgatttacatggttatatcattcagaaaatagaaagagtcgttatcactaaatttacatgtgttgattctatacgaagctgttgctttcggatcagacctgccatatttgtcccgagtagaaaattactaatggtagcagcgtccacaacagtatgctgccagccaatcagattacgccacgtagacatctcctccctcgagtggccatagtatttttcttgcttaattagctacacactaaaaacgaagacttactgtgtaaatattgaaggaggcgagggcatatgatgaaactaatatagtactacatctgtcccaaaatataacaacttttggctatgaatctggacactaatcaactttcagcagtagtgcaaagctaatcctgcaacctgcagggcgtgtgctaggtccaccacttgcctcgttttcttgcatttctaccttttacaagttgcaccttggagggctattcagaattcgatgactaaaatgttcaattccaatgactaaaagttgtatggttatatttgttgcaaatataccatatgatagtattacatgatttagaatacctacaaaatttactggtaaaaaacagagagataattgtggatgtatgtgcgttgtgtgcgcaggtgtgtcttctatgaaattgcaaatatatattgtgagatgggcgagagaggaggggttataaatcactagtgagatagattgtttaaattgtttgaccaacaccttcccataaaataaaggtgaatgaaaattgtatatactccctacgttttataatataagtcatttgatttttttagtcaaagttctttatgtttgactaaatttatagaaaaaattagcaatatttataacactaacatagttttattaaatataacattgaatatatcttgataatatgtttgttttgtattaaaaatgttactatatttttctataaacatggtcaaaattaacgaagtttgactaaaaaaaagtcaaatgacttataatatgaaaaagaggaagcggatgttattgcacatggtaacatgtggttagaagacaaatttattgagggttgaagtttggatatttctatcctatagtggtctacacgtaaaagtataattttgtgaaacatgttttcaaaaaaaaatgtgaaaaaaacaattttaaattacaagagagttttatgaaaaaaaaacttagaggagtacttttttgatctttgtgagatttactcaaaatcttatgtccaacaccaagcattaatagggttgatgctaattgtttccaaatatccatatactgaaaacacaatcctgctcaagtcaagccttaatccaaaagcaatagtgcagtttatgcattcacaatgttgttaattaatgcatatgcatacttactactccaaaagtttcatgatgtcaactcatttataatgttagtgttccactaggggagctttaactgaagtatttcatcagcttatgtgttatctttaagataatttgacttgatcatatctactttctgtaatttgtcttatgactatttatgcccataagaggggctcactaatactactttcattccatcaactactaaataacattttatttctactataaaaatacattatacctatctttagtggaaaaaggaaaacactgaacctacagttttgagcataagggtttatatatatttaattgaaactcaacaagaaataaaaaattgtgtacatattattgggttgcatgtgatatatttcgcgtggctcaaggtcaaatttgatagatcgacaaagaagattgggtacaatgtacaatatattgtatgacacgtgatatattttgtgtggctcaaggtcaaatttgatcgatcgacaagacttattttggtatgatgtacaatattttgtaggatatgtatttttttcataaaacaacacacgtgtaactatgaagttgtcatccttatttaggagagagttcacaggtatgacaaaattcgggcaactttgctagtctagtctacttcaaaaaactgaactaacctatcaattttctatttttccacttttattttggcttgactgtctataagatattttggcttgactatatctatttcttaatttgtgttaactatttatgcccatgagatggttcactagctaatacttctttcatacaaccaaccactactagtaacattttatttctacttttgttacttatataaaatatattatacctgtttttagaggagaaaggaaaacattgaacctataattttgaaaaggggtaaatggatatgtgataccttatatctagagggttatctgtgcatattaatctcagcaaaagaattcaaaggctaaattgcacttgcaagcctcacaatttttgtcaatagatattcaatcatgagtatttatatctttaagtgcaactcaccaagaaataaatcaataaaattgtgtacatattatcgggttgcatgtgatatattccacgtggctcaaggtcaaatttgatcgattgacaacatttttggtatgatgtacaatatcttgtatgacgtgtgatatatttcgcatggctcgaggtcaaatttgatctatccacaagatttttttttgtatgatgtacaatatctcgtatgacatgtgatgtattttgcgtgactcaaggtcaaatttgatcaatcctcgaggttgttgttatgacgtacaatatctcgtatgacatgtttttcccccaagaaaaatataatcgtgcaagtatagtgctggcatccttattaaggaaaaggttccctagtatgacaaaaattcgagcaactttgctagtctaatctacttgtgaagtctgaactaacttatgattgttctcttttgccacttttattttggcttgaatgtctataaaatattttggcttgagtgtatctattttgtaatttatcttaactatttatgcccatgagaggggttcactagctaatactactttggtatatgaccaacaactaaatagaattttatatcaacttttattactactatgcaatacattatacctatctttggaggagaaaagaaaacattgatcctataattttgaaaaaggttaaatgtatatgttataccttatatctagagggttatttgtgtatatatagtaatcttaataaaagaactcaaaggctaaattgcacttgttgatattgtcaacaagatattcgagcatgagggtttatatctttaagttctattcatcgagaaataaatcaataaaatcgtgtacatattattggcttgcatgcgatatattccatgtggcttaaggtcaaaattgatcaatttttttggtacgatgtacaatatcttgtatgatgtgtgatatattttgcgtggctcaaggtcaaatttgatcgatcctcaagattttttgttatgatgcacaatatctcgtatgacacgttttttccccaataaaaatataaacttgtaagtattatgttggcatccttggaatagtttcatagtatgacaaaaattcgggcaactttgctagtctagtctacttatgaagtgtgaactaacctatcattattctcttttgccacttatgttcctttttctcataaaagaattgcccccatattttctaaattactagtagttttttttgggacattgcacccatctttagtattactacctccgtctaaaaatataagaaattaagataagatgagacacattgtattactacgaatctaatcagggaaaccgtctagattcatagtagtaaaatatgtcccatcatttttgaaaaagagggagcagaagaaaaggggcatagtgtccatcgtgtaccctccattggacgcatgtccagattcatacttagaattattattattattttttaaaaaagagagtatataccaaacaaaacaagaaaaaaaaaagctatttctaagagataacaatgtcatcacctctcatgtcttggggcccatccatccatcaattcagaagtcacaagccaaataataatatccaaggaaaaaagagaggagggaccaatctacaatttcaagaacctcacagggctgtatccgaaaaactcccccgatcgaataacaaccaccaccacaccctgagcccgcggcctcactgccatcgagaggtcgtcgtcgtcgtcgtcgatcacctcgtcgtcgacgcaccaccaaagcaaaggcaaaccaaaactcctctcctcctcctcgtcttcgccgcctgcgcgcgtcgccgtcgcgtccagccggggcggagggagggggggttcttgaggatggtggaggtgggaggaggagcggcggaggcggcggcggggaggaggtggcggctggcggacgagaggtgcgacctgcgcgcggcggagacggagtacgtgaggcggttccaccgccacgagccccgcgaccaccagtgctcctccgccgtcgccaagcacatcaaggcccccgtccacctggtgaccttctgcagcttcccctgaatccatcgctgcttcggtttcttggtttgtttattcttggggctctcttctttaatttctcgatcaggaaggatgccaacaaatcgaaaagcttaatttggaggctttcttgttctgcttttcttttttttcttcttgttcccctttctgattagtgtgcggcaattgatcgaaacagttttatatacgcgatgcttgcgattgatttctgtttcttgcaacaatcgtggagctgttcttggattgggcatgctactttgctggatttgctctgcaggaagaagaatgcgcagatgattgatcgcaatgatatgatggctagtacgaaaatcgcacggatttttaattctgcctttcgtaccgccatctcacgtgggaagatgcttccccccacctcgagatcccggctttatctgatttgttttttgtttgattatttttggatttctggatgttcttgcattggtttctacttactactttattaacctttttcttagttgtacctttattctcttaataagtaatactcctgcaaagaaatggtagagatacccttgagttggattccactcctttcgatatctattgagtggttctaagaagattgggttgaaatttagctttcttttttgcgttttgttttgtttttttgttttttttttttttttgcagaatcatgtgatgcctgtgacactgagagttaatcaaatgatataaagttatcatttttgtcaattaccagcaacagtaataatcagcatattcttaaaggatgcctaattccaactccaaataggagtatatttctatagagatcattggcattctctagagtctagcctctgtttctccatttagaaattctccatttagaaattgtgtgtctctgattaaaagagctgtcctattcaatctgtcttgaatgaaacttttgcaccatccttgccagcctcttcagttaatttctgttttttctttcaactgttcattgataggacagcctgaatgatctagcacagttgggatctttatgcaagaacatttaatatcaactgccctgtttgttgaaagattattaatttctacatattttttttgcctaatatacttttgtgtagtcaaccaaactgcagctaattgaatttgtggcaaccaaacctgcaggtttggtctctggtgaggcgttttgatcagccacagcttttcaagccatttgtgagccggtgtgagatgaaagggaacattgagattggcagtgtaagggaggttaatgttaagtctggcctgcctgccacaagaagcactgagaggctggagctgttagatgacaatgagcacatactcagtgtcaggttcgtgggaggtgatcataggctcaaggtatgtttccatgttgatcaaccgttaataatcttgtaattaatttgctgttcagatgttacatgttactatggatcagacatgttaataactgatatcttacatgtgactattgtgcatttttcgattttcctttttctgtttaggattgaaacttccttgattactaaggaagcagtaatcatctgttctccagatttctaatcaagattcacatagtaccttctaactgaacttcagatgggcactagagattttatcagctacagcagcttcctgaattttcagattttgttgacaattagagcatttcatacccttgcagcagctgctgcatttttttatgccaaattagtactccctccgtttcgaaatgtttgacaccgttgactttttagcacatgtttgaccattcgtcttattcaaaaacttttatgagatatgtaaaattatatgcctatataaaaatatatttaacaatgaatcaaatgataggaaaagaattaataattacttaaattttttgaataagacgaacggtcaaacatgtgataaaaagtcaacggcgtcaaacatttcgaaacggagggagtatactttaaccattggttactagaaccttatctgcagcttggtgctgcaacatattctgcatgatctgtcatcttaaaccattttactatctcagtgctttgcatagtcaaaccgtatgcacatgacgggttgattccactgattagagtaatagactctcttgctttgaaaaagaaaaggtttttgctggatacactgtccctggactagcaaacagagcacacttgaaacaatagacaggtgtacttttttgtcatctgttctgctcatgtcctgttcagttattgacaacaaggaacatgcacgctaatgcgcttacaatgatgaggttaatccgtaatttgttattttattagtgctctaattcatgcctccccactggccatgataatggactgtgggggagatatttcctgctggtctgcgcaacctgaatttttcaattgtcacatcttcaacgaacttttgtcgtctaaccacaaaacaagctattggttgtattgtattcccttggccatatgaactaacagcatggccctgactggccatttctttgaccttacctgccgaattcgttgcatgaggatctgtcacttgtttcaaaacaaaaattaaatagaaaatccaagaaataccattgataaacacccaaatccaagaaatgccatcaatgagtgcgagttctataaaatgccatcgtacaagcgattttgtcctagaaataccattgtcgttagggttccatccatcccacgccgttaacggaaccttaacggcgatggtatttctgggacaaaatcgtttgtacgatgatatttcatggaactagtagacatttcttgaaattggatgcttgtcaatggtatttttttggactttctcaaaattaaaacaaaataaaaaaatgagaggatctgtcacttgttccaaaacatttttttttaaaaaaaaggatctgtcacttgttttggcatggactcatggtccattatccgtttgctttgctcagcggcgatgctggcacaaatggcctcacatgcactgcatctggataatggaaaccacttgtccgaatccgagggagaaccttatctctgcctcttggtgttagctcaaggacactgaacttgtgagctgaataaactgatcttattgtcatttcttttttccttctttccacagaattactcctccatcctgaccgtccacccggaggtgatcgacggccggcccgggacgctggtgatcgagtcgttcgtcgtcgacgtcccggaggggaacaccaaggatgagacatgctacttcgtggaggccctgctgaaatgcaacctgaaatctcttgcagaggtttctgaacgcctggttgtcaaggaccaaaccgagcccctcgaccggtgattgttgccaagattccaagagctattttgtgttgcaaatgcttaattagattgtgcagagttgctattctccaatggagcccttaggttctttttcttcttgttgttgttgaatggttcatgagagacttgtgagagagtgctgctgctactgctgtgctatgttcaaaccaaaagagaagaaaaaaaaatattgtgcctcctctttgagcctctgttgctgttctttaccaccctagtatgtcacaagggcctaaaaaaaatattgtgtgtttcgttagtgttgaagtacagggattattagaaccatataagggcctaaatgccagccggtttcgaggcttggagggctctctgtaattagttttgcctttagttcaattgccaccttaatgtaaatttacttctctagatctctatcatggttaagagagagcttgaaatactgtagctgctgagcttgatcaattgtttctggctcatttaacttgtagctcaacaaattaagagctctgatgcatagtcaaatccaaagtggttggcacaaaagtcgcctagaagtaattaagggggtacagtaatcacttgtaatgtgaaagggagaggcataatatgatcaacggttagcaacgcaaaagctctccgctgttgacattaattaatataatgaaatcctcgaagaagttgggaaatggtcgatatcaaggtgagcgttacacatggctcactgcatccgcatgtctttgtttaatgtctaatcatggttatttcccgtttgttgtttagtggtgtaagtggtcacctcagtgtgaaggaagcgtgaaattagtcctattggttatctgtgtatgcaaggtcaactactcaactgctagctacctctaatacgttgttttttttttgtttttttgaaaagaaggcaagaagtttgtcttatatattgatagagaagaagagttcataggtacaaaggaattgggagttagggtcattccggaccaaggaaaggaagatgactactcacacaaccagtaaatctcagttaggcaactcaccccgccattacccatatatgcgcttcctcctttactttatttttgccatgatggaggttggagtgtttcccagatttttgaagattcttgagtttctctccttccacagttcccatgcaactagaatagttatcgacttgagggctttctttggcatattttgcatggaggtgacttccatccacacctctaatacgttgtgaagtgcttctagatccttagtaggttttgatgataaatgacaatgtaattagaggatatatcatgttgaatgagattagtgtaggtattcatcctatgtgcttaataatctaaaaagatggagaccccgaccccacaaattgatgcgaatcggtgattggctcaaggcgatttaaatttattttcggtttgaatttgagtcataggaaaactacactacactattaagaggggctggcatcaatggtatgcgttgtgtctaagtgccctagtatcacccttaattttgtagagagagacacaatgcaccacacatacaaaaggaaaattggcggtccttgaactttgaccaaaaattttgataaattgcaccgaaacgttaggtcagaattcattgttcggcgctggaaggctgaccggaagttcaggtcatttctctggaccagtataacaacctcggacttaaggttcaagtcttttggaaaggagattccagtccctatcttagttgctagttgaagtgttgacctgaagttccgatcttccacacttgaacttccagagtttgaattggtaactgttagttgtggggatgggctagtatttaaccctacccatccccattttgattgtctggatagcacatcttttggacatatcccttagcttctctagggctcctagccttctccacttagttcttgagccaaaaatcttgtgagcgagggagttttggatcttgtgagcttgggagttatagttcttggacgagcacctagcttgggccgatgtcaggtcatcatcatcgcgcttattactctaggtggttctccacctagtcggctaggtgtcacacgtggaggatgtgagctaatgtctgcactaaatgaacaaaatttagtcgcacgagtcacggagagatttttttaaacagaagcacccaatccgcttcaatatgtccaatactcatgctttggtgttttttgaattattttgttctggtgaaaaccatcgcacacacatgagcaaatatcgacactaaatgcaaaaagttcgtcgcgcgagtcacagaggtaagtttgagtgaagctaagctaatttctaagggtttgctcagtagagcgagcttcactgaaggaaggtgtaaatgtgtaatattccctttgtggccatcccatcctttcttcccatgaaccaaatacataactaactgatcaagtggtccgaaaggataaaatatggattgtaaccatgaattcatatcctctaaagtagttaagtatgcacacggtcatactcccactattctaaagtccaaggatttttatagtattcgaagattatagcacaatataagtattttgagacactaattctaatgcatgaaaatccataatttctcaacaatcaggtacttagaaggggatataagcaattgaaaattcaaactttaacaactgaaattactaaaattttaatgttactatttactaaacaacctaaaatgcttatattttgaaattaatcgaaaacatcaccaagtgctaactgctaagcacttatcacagagaacaaaaaaagccaaaaagggagcatgacaaacaaatggtcaatccatactatgttcgatttttttcaatgctccggaaagaagaaaagaacaaatcgtagcgctaccactggtaacatgaagagatcagccataaggcaattcccaacccaataactaggatggtgtctataagagcaagttcaatagtatagctcactactagctccaaatcatctatagtcaatataatagtcagttcatacaataattgcttactatactataaatacttggtcctacctatcatacacacattacgtcttagagttcgtgctgcagctggctatagatctgtagccagctgctcttctctatctttctttatttctttaaaatatgtttatagttgacttatagcttcctattgtacctgctctaacattaaataagctgtcatctagtatagagaaaattgacattgtgccattgtcacgatgggatttcgctgaaatgccattacacagatgggattcaataaaatgtcactttcaacccgtgtgtctacgctcaaatgccatttgcatcgtttctttccaattaaaatcattttgccctattttatcttgtgtgttgaccaaaacacccctgttttcacattgttttccccttgttttccctgttcaacatggacagcaatggtgtcggcgtaccggcagcgagctgctgccgtgagccatcgtgttcatcctcgatcagccatctccaagcagcaagccgccgcccggccgacctcaccgcagttcttctcgtcgtcccccaccgtctgtcgatcgtcgcagatcggctcaccgaggcaccaagcctcttcgcggctcgtcgtcatcaccgcattcctgtttcgccggtcgcagcgccgcgcctacttctccaccatcacaaccgttgctgtggccttcttcatcaatgtcgtcgacgcctgtcttcaccaccgccagcggcaatcccatcacttgtgacgatggagcagctgcccagatccaagaagcagccattgatctggacttcctgtcatcctggtaagcagcaacttgcttgtttgtgcaggcttgaactaggagagaacacaagcttctttaagctttactctgccccatgccggccgcttccgcggcgaagcttctcctccagtccgcctcgcccgacacccatctctttctccccacgaatgataccagctagggtattttggtcagaaacaaatagaaaacagggaaagatgattttaattgggaagagatggagtaaatggcatttgagcgtagatgcacgggttgaaagtggcgtattatcgaatcccatctgtacagtggcatttgagcgaaaccccatcgtgacaatggcacaatgtcaattttctccctagtataaaagatgatgtggcaagtgaataaataaggaaagagatattgtttctacacaatatccaagacatcatgtgagataaaacattaaatttaagtatataaaagtggtgttagcattgaaagagtagtgtctagtactgatttttttgataatatagaatttatgaaaactatatttagtgtcttgggttgggaatggcctgagaacccaaatgcaacaataatattgcataatagttttaacgggtcatcttttttttttctaacaacatgatttcacgtgcatgatgactgatctctacgactctacctcggtgtgctacactattgaattttgcgcttgctgtgttttttagctcaaaatttgtcccacgaagactgtcttcttaatgatttattagccctctttaatattattgaatccttttctcttttttttttttttgccattgaaccaatagtctcctcattcattctcccctcatttctctctgtattaatgaagagcataatagtcttctaatgttttgcttggaatgactttgactctctaaaagaaccgtcttttggggacggagggattatgtgagtatgtgacggtgttcctaattaactaaagcaattcgctaaagtatttaattaagaagattgagctgaaaaaaaaccaaaaaaaaaagtactcttcattaaagccaagaccgattacataatctgatcagcacggacggttaactcactaggtagattagatgtatcctccaggtttccatttctgccatgcactttgaatcccggatttcatcttgggtaaaattcacatcaagcaagaggccaaataggcaccactttctttacaatttacatggttcaacaattctaatatatcaaaattcagagtaaaaataagttcacatgtgttatgtcgacagatggtccagtacataataacaagttgaacaaaatgataggcaaaaagggaagactatgaactatggtatatatgcgctaaccaatctctcgtgtgcttgctcttcccaagtttctttggagcaaatgcaaagcaagctgaaaaaaagggctcatcgatcactctcaggaagagatcttcaaagttctctgccattgcataacctttcaaggccattggaactgcagaagcacgtgtagatgctacataccatgagatggatcaggaaaggaactaattctctacacaaaatagcagtgtgccggttttgcatttgtatgctgtccagaagaaaaagtctcatctgtaaaagaggtaaaattttctgtgtgtactgagaaggtttatcttttctcagcttgcaacctcaacagcctcagcttctccatcactgtagtctgcccaggactttggattttcagtcacggctgaaccatcttccggggtaattgcaccatctccatcacctttggaagcttcggtttgctcaggctccccttcgccgtctttactttccacatggttcttgccatcagtgtcctgtttttcactcccattttcagtatcgaccccactggttgtatcatttccttcaggactggtctggctaatttcagaaacttgtggagatgcagttgcaggtgattctactatactgtctgagggagaaggaaggccatgaggtgaagcttcagtgccacctggtgatgctagaggtccgtttggagatgctgggttgccattaggactccgagattgacctggcacaaactcggctgcgttagggttcatcaccctagtggcaaatgtgtttgcttcggtaaggccttcactgcttggcaaggcagacttgttacgagggccacggtgacctgatctgttgtagcctccagccaaccgtggaccataagggactcttgcggttgcagattggtgagggtgtttacgaagagggatcgacaacatcgggggtacattggctggtgatggcagcaatcctccatgttctctgaaacctggaatggccattgacccaaaagctggaacagtggagggattgaatggagcagcagcagcagaaagcttactggccgtctctttggcacctggtgaatcattcttttcactttcagatggtgaagatttctcattttcgcctccactagacatctgttcttgagcatcctctcctgcatctctttcatcatcattggaggaagaatcatttgcctcagtcaccatagatgctacttcgtttggggcattagcttcagttactgttgttaatgattgagatgacgatgatacatctgaggctacaagatctcttttcttctcaggttgtgtctctgattgatttgatccagccaaaacaacggtttgttcgtcatcaggattggaagatttgccttcaccagtttctttggatccttgggaagtactatcttttggtgacacttgaacagctccatctttctctttagaaaggtgaccattgctttcctttggggccttagcagtttcaatatttgcacctgcatcggttgcatccttttcctccgtttgtgcatcattcaatgctttgacaagagtccctggtgcagctattgcaacttccttgtatgatagtgccttccttactgtttgactggcaattggtgctgaagacaggactgccttggcagctgctggggtggtggcagggcttgctgacagagagttgggattggaagaattctccgcactgtttgatgatatagcagggctgcctggtttggaattgaagcttgaactcttcaccagtttctttgcagttacagcctcactaggtaaaactcgaggggaagagaagtttgatggagctcttcctttgtatcttccattctcagtattgtttagtgcatttgtgttgatctttgctagattcggcctccttgcacttacaccagttttgcggttcccagtggatcgtccctttggaacagcttcttgccacccttcatccgacgtgtactcttcagtaaaatcatcttgaggtatacggcttaaggtgttacctggtatttcttctttcagtttctctttctgaataaacgttccattctctttgacttcagaactttccttctcaattaatgaatggtcacttttaggtggtgggctcctttgatcttcatcatcgactacttcagatggattttgcccggcacgacctttgatctattattcataatgtgcacatatgagtgaccattggcgaaataaaagaatgccatatagtaccagtggaaggccttaacaataaacataccttagcgcgggcttgtttcttttgcatttccttagccttgagttcatcatctggattgatataatccagaagatctgatacactgaaagaaaaatcaatacctaagcacaagcaaagacaatcatccaaaatagatcgatatgtaaatttaaataagtatactcttttccttttgtaagcctctacccccgaaatgtaatcatcataaggataacagtgacaagcttagtcagcacgctatggcatttattagtccatgtagacacttagagatgagttttttttcccttttatttttagatagagggagagcccctgccatttccagtactagaaatggcaatagtgcaatagagatcattgattcacaaataaacaaaactcaatcctaacttttgcaaccacttttatgaaacaacatggtaaagacgagcaatcatgtcatctacctcaggtggcctctgcttgctattgaagcatcaggctttggagtaccattacgtgctgcttcctgctgctctagtgccttggactcaaaatattcaagccaagcagcagcatcctgtggaaaacatagttattagatttccttgctgcagtagaatggaaaataactaaagaatgaaattgattggtaagtggaagaacacatcaccaggaagcaatttttgtcggcttacctgtgtacgaagatcttccgacccaagctttgcttgaagtattcgtaaagtggttttttcatgttggacacttaaagagtatgcttccattaaagacagagcaatagcaatagcatggtaactagcagcagtctgtcaataaaaacatcaagatatataagatgagttttcagtctcaagttttctttggatcatgaaagggaatggttctcatagttcccagcaaaacgagtgtgaacatcaaaactgatgtggccatgaattagactactgtatgtgtcggaactcaattgagaactaaaacagatagggttgcaaacctgtatgtgatcagcaccaagcaacctcttgttgcattttagagcctcatgaaggtaacgaagtgcaacatgaacattacccagcccttcttccatcattgccacattaatataagttgcagcagtattaggatgagagggtccacatgtcaggtgcaaaagatatagggcacgattcacatacctgatacacaaaacagagcataacatagttgagatttccaaagagagtaaatagaacagacttcatagcttactcataaaaacaaactagatggcaccctaggcatatagcttttgtaaacgacaacaagcacatactttaatgccaattctgtatgctgcaggcggtaatagaaaactgcaagatctccatagcttttcattgtatctggatgatctagtccaagttctctctcatttatatctaaagccttctgttgatagattgttgcctggtaaaatagagagtgaacatttataaagccagtcttcacagcactggatagtatgtatgtatgtatgtatgtatgtatatgtatatatatgcatatacaagttaaaccttcactcaaaaaactacgagttaaccccttgacaagtgtatatttcagtacttcatgtaacatgaatgagaaacattttgcattatattacacttaagcagcttacagtcacaatttccacatgatcatcatattaactgttgttcaaaataattctgcatgattcccattcatcgtacccaagatttgtctagaatcagaattcaactttaacaatatttgcacagaagacaatatttgcaatattacattctacagagcaatgtataaaataactactggcttaaatcccaaaaagaaaatacctggttgaagtcaccagtatgataaagcactactgccaaaaggctgtatgctcctgctgtcattctgtgataaggaccacaaacagcaacaagttttgcaagagcctgcatcaccatgtataatcaacaggatgtagtggtcaagaaatcatcatgatgtgtcaagacacaagatcaggactgtacctttgtgccatagttaacagcatcctcaagctttcccttgtccaggaaagtcttggatgactccaacagggttcgaccgtctgctgatgagcatgcaacatgctggagtaaagacatcatggttaaacatgttaataaacaggaagtatttgcatctcattcaattacagaatccaaagggttaaactttaccttgtagataggaacaatgctgattatatctgaccttctgaatggatgtggcatatccatgtcataatctttggtaactagctcaagtcctacctaaattgcaggagttgtcgttcaaaccatggttccaaaaatgaacaagtgtaacctataatgttgaacctcgagggaaaaagaagcaatattaacatccaaattattattaccttatggcagataccacgaaggatggcatattttcttagatcagcacgatattcgtctttccacgtccagccaaatctctttactagaaagacctccagccacctttgcctgagattgttatcctcatagcacttgccatcgttattttcttctggaaatggtcccaataagatattcaaacatgatgcaaccacctcagccatgtcatttatatcatgaacagctgaaataacagcccgaagtacgtgcttaaatgctcgaactaccatttcatgtatacacaaggattgtatatgtgggagcttatcagcaagctcaacctgaaacacagtaaaataaagtacttcagttgtcacgctgatgtgaaatatatcttatccttttaaaacgaatgaaaattcttcttagtggttcaaaaaataataatctagaactcgacccaactatgaagtatgtaccacttgtcctagtgagcgcatctggagtcccctggtgtgcataaaatctgtcaatgtccttccatcaacaggggaaagctcaagtgaaccaaaatctgctacctgataacatataaaggtggtggaaaattaatttctcagtgtctcacaaagaatacatgtttgagattgatgccacatgagtacaatacattaccaattttggcagagctgtatcatcataatatttgtgcgccatctcaattaattcatcaggtgactgcatagaaaagcattgaatcataaagaataatgtcacagagaagaatgataggagcagcgccagagaagcataaaccctgccgacctatagtacataccaagctagttcctgcagtaacacaggatatcaccagatatactaattatgcaccgtaaatgatatggccaatatgatagattatagtataagctaatgtggagctaactgttcctagcaatataattcataaatcagtcaagtagtacagaatttgttgtgatgtgctgttgtttggagaagaaggggccggtaaaaatgaggtaatttcttgggacgacatttgagaaatctccaaacagaaatgatcagggaaaaaccttagcatgcagtccagtttcagattcctttagtctctggaaagcagcttctggaagccatctctgtagaattgcctcattatcctcctttgtgctggaagagttgactgtttgcgcatcatttgtatttgtcgaagtattttcttttgtggatgcaccttttccactcttttcatctgtcttcttcttgatctccttcagctgaccaaactgtttccccagacctttcactgtaggaacatccttggtctcctcatttttcttagtgtcggccttctcagaagtctgattctgtaggtgctgcacccagcaagctccaagctcccatcttattggtcttgtttctcttggagcttcacattcaagcttctgcagactatctgtcattatcttacggacaaaatttgtactatattcactctcttgaggagaactttgcaaccgctgaactcctccagatggttgaatacatggtttatgaagcagcatccttaagctgaaaagagataaacatgattgtcatagattttatccaaccaatacaatggtaaaaatagattaagaaaagagagaaagaatgaaatggaccaagacgaacagaggtaaagtaaatcacttaggactgatttgggtaaacccatggtttagaattatcaggttagcataagattatatatatatatatatatatatatatatatatatatatatatatatatatatatataaaatcaattttccaagtactaacctattgacattcagtgcgttgctacctccttcaggctgatcttcaatgtcaatatcatgttgtgctagagaaacagttgtcagttgagcatctgctggaacttgaacaacagctgtgtatccacaatgcttcacaaccaccacaccaagagtagcagtatcctgtaaactaataaaattacatcgacaataaacaggaaaatggataaaagtaaactgcaacagcccgtatcaaagaagaaagtcttacatgtactgttgcactctcgtcagcagtgatgcccttcaacagatttctcttagcaagttcatcagacagcattcctggagcttgacttccatctaacttgacatctaacttagaacttgcatccgctttgtcctttgtgactgttattttcatatctccaatttgttgcgtgtgcaaatctggatttgtggtgtcattcggtgtttcaagtgaactcttgtcagggaccatttgctgaatagctgcaacagctttaagaactgcaacatctacaaataaactatggagtaggaaagccttcctgtctcggatttgcctctcctcagctgttttgcaaggcattgcagccagtatggcaaattcttttgcccatggcctatggtcatgttttccatctcttccctgaccaccaccattgctaccccatgtttcatcttcagttggaaggggtggaaacaccgatggcaaatcagcaacagcaggagggaccacccaagtgtttgaccggaatccataaggaagatttccaaactgcaaggaaatgtcaataaaatgtgaactataaatctctcaaatgcaattgcaaagttgtgttaatacatgcaaacaaaatatatatataggtacattaaaacaagcacactattcagtttagtgaaacaaaatgcattagcttatttccaattccacgaattcaattgtttccgtggaaaatagggtatgtctcttcaaatgcattgaccaataaacctagaaaatgatctctaacctaaagtttagctttgaaattaataatttttaaatagtcacatattcaggcatgtctgaaaataatcaagaaatcaagcattagcaagacctcaccttattatgctcaacaaaagccttcataagagccttgtaagcctacaaaatcgcacacatatttccacatcaatgagataccattcattaataatcaaatcacaaaatctccaaggtcacacgtactccatcaaacgcccggctcgtctgctgcaacagcccaacaagggagtggctgatgagcgctcgcttccctgctggatagaatccagctttggaggccacgatggtcaccggcttcccactacaaacccttacctgcacaccaacacccaattgcagaacgcttggagaattatacaggtgcaaatgagtgtcatattgcatttttttatgacattggccatattgatggttacgtgcgtgctatgataaattaattaattgtagttttcatatatatgagttgcagtctaatctaatgaatatatagttaaattagcatgagattttgaaacaactattggcaaaccttatctagctactctaatgtaatgcaatcgaatcaattaaactaaaaagaaacatcacatttgtgctatttttcttcaagcaaactcacatcgatctggaagaagtcgtcctctgtcttgtcatcaacgaatgggcgcgtcgacctcctaatatctgaaaccaatcgcattttcacttaaacaaaagtggaagaaaaaaaataaatatcacccgaaccggctcaccatcttctgctgttccgaatgcgctcaaataaaaaaaaaagaaaacaaaaatgaatgagaagaacgaaactactagcactcacaatggaggggcggggagaggtgggagaaggagaagaactcgtagaactgtcccagcttcggcggcgggtacatcggctcctctcctccaccgcctccggcgccaacgccgccgccgccgccggcgggcgacccgggggtcttggcggcgtcgggcgacgccggcgggggcggtggcggtggcgcatcgggagacgacggcgatgcgggcttctgctcgggcgcactcttcctcggcccgaacgcggcggtgcaggcgacgatgtcgagcagccgccgcacgtgcgccacggcgagctcctccgtgtagccctctgccgcgcgccatgggagacgagacggtgagttttttatttttttgcgttttggtcctcgagaaatacgggatttgctcgttcagacttaccctcgacgatgctgacgtggcacggcttcagggaggcgacctccaccgtgtccttgagctgggccccacgaacctgcattggtggcagagagggagaaagtacaggctgtcagtgggcacgaatctcgaggcggatgtgagccgttgggatcctctgaccgacctcgtgggacagggagtagttggtgaggtggcatgtgtccacgtggacggccaggagcttccggacgtcgaggatcttgtccgttgatatgccctgaacaaagcaccacaaacacaaaatgagctaggcagcgagttggcacctaccactgcgaattataagtaccatatttaaattgataatttagccacacaaacaacccaatatgaaatttgagatttaaactcggaactttaaccccaaaaataacccagtcttgtttagttttcaactttttcttcaaactttcaacttttccatcacatcaaaactttcctacacacataaacttctaacttttttcttcaaattttcaattttagcgtggaactaaacacagccctaatctaaaattcactaggagatttgaactcaaaaccttgggaattgggacgctactgaggttactataatcagtaggctacatgccattgcacaaaatggtactatgtacttaagctaacacaaccattgctaacttgctcaaaaataattaggatgtgtaaattgcccatgaacttttttgtgtaatgttcgtatagaaaataaaaattctcatcatgtacatttcaacgagtggggtcattctttgccagctttgttaagttgccgcttatgctcggtcgctcgccattgctaattagcacaagaaaaacacgttttctgtgcaattgaaaaaaataaatatagaagtttctaagagaaaagtggtaggcactttcgctttaaacaaagtttttttttctttttttttaaaaaaaacaagatgaaagtgttgcaagtgaaagctagagaagaatttacttaattttgtcgtttaacatgcaagcacaattaaggccatcgaatagaaggaacagtacatattcagttacagtggtcactggtcagaatactgggtggtccatattaattaattaattacgcgaaaatatccatgcgagaagacggagataatacgcgccccggcgctcaccttgagcgtcagctgcgtgtagtccggcgtctcaacggtgacgtccagcacggtgggcagaactgcagcagcatcatatcaatatttccacgcaaaaaccactcacatgttaatactgaaacaatatgaactttcaaatattgaaagaggcaagctagcttaattaattaatccttgcatctgaaaataacttttgtcttgaaaacgaattaaattaaaccaatcatccgagctgatgaattcgatgaaaattcagatgggaagtgaagaagattcagttagccatcagttaagctgcacctttctcttccttcttcttcttgtctcccttggccttgtgcggcttggccttccctgccttgggcgccatggctggcgtccctcaagctaattagctaagctaagctaatgaattgaaacctctcgataatctcgttcttgtcagaaaccaatcaagcgagacgggattaagcggcagctctacgttggccttagcattgcagaactgcaggtcgcttagcttagcgcttaggcaggagatagcgagcgagggaggcagtggagagggaagctagagggtgagaggcgataagaggataagggatatatagctgcttctagctagctagcaaagctgagagttgcagcttctactaactctgaacctcaagcactgttttctctgcagaacggaataggacaaagggtgaaccggtgaagtgtttggtgaattattttagtctaaattaatactacctctgcttttttaatagatgacgtcgttaattttctgccacacgtttgaccatccgtcttattcaaaaatacgtaattataatttattttgttgtgagttattttatccctcaaaatactttaaacatgatttatatcttatacttctgcataatctattatattattaaaacagccttaaatgaaggcaccactttgccgccgtgggggctagaaattcccacattaatcggagaaaaagaaaaggagagtccaaatagaaatacaatttaaaaatagctgaattcggaattaaaaataagtaatattgaaagaaaactccatataggaacccaatatgagattaatcgaaattcagaataaaaataaaataaaatctgaaaatagaaaaaaattaagagtctaagtaggaatacaatttaaaaataattgaaattcgaaatttaaaataaggaatattgagagaagagtccatataaaaacccaaagcgagattaattaatattcagaataaaaataaaaataaaatccaaaattagcaaaacgaaaagaagagttcaagtaggaatacaatttgaaaataactgaaattcataattaaaaataagcaatattgaaagaagaattcatataagaacctaatacgagattaattaaaattcaaaataaaaataaaataatatcaaaaattagaaaaattaaaagagagttaaagtaggaatacaattttgaaacaactaaaattcaaaaataaaaaataaaaatattaaaagaacactatacagtattaattaaaatttgaaaaaaaaataaattctgaaattagaaaaagaaaaaatattttagttaggaatacaatttataaataactaaaattggtgagaaaaaataaagactattgaaagagaagaccatctaaaataaatgacgaggtaaattaagtaacaagcctataaaggagtagagtggtgacggttgatacgacgtataaaaactgttaataaaacaccaaatagaatcctaatgacgattaaaaggagggacgacaggcaggccatgaagcaaacaggcaagacggttgccgggacttctagaaagtaaaaaaaaacccgttgataatcatattcggtttttaaaatctcaatgacagtaaaaaggagaagcagcgggcggggtgtataagagtatagttgcagagctgttaactgttggcgggacttcttaaaaataaaaaataaattccaacgatagttatgttcgatttttagaatcccaatgaaaacaaagagtaggcggcggatgggtcgtaggggagtatagtggtatcgtttgacgggacttctaaaaattataaaaaataaaacccaacaagaaaataaactctaaaaactacaaagtccaatttctaaaggttcggaacttcttaaaaggtaaaaaaacaatgataattatgttcgattttaatatctcaatgacactaaagaagggagccagcgggcgagccataaaggagtacaatggcaaagccgctgacagtttggcgagacttctaaaaagtaaaaaaatgaacctgaacaataattatgttcgatttttaaaatcccaaacaataaagagaaaaagacagtggacggaccgtagaggaatattatggcagcgtttgacgggacttttacaaattataaaaacgaaacccaacgagacaataaactctaaaaactataagatccaattgtttaagatttaaaggataattaatagaaataatggtagattgagcgagcaaataaagaaggatatggcagaagtaaggggtagcagctggtgtgacttttaaaaactatataattagaaatacggagatgataaggtttggtctttcaaagtcttaagacaacaagatagctatttaataaattttaagcaaaatcatactgaaaatatatgattttgcttgggtgttagccgctcaattacgcggggcacctagctagttttcttttaataagacaaatggttaaatatgtgttcaaaaatcaacggctttatctattaaaaaacagagatagtatgatatatagtggaatttacaaagaatttaatttcgtggggtagtatatttacatgtgggccctagaataatataatcaaacggtgtgccatatgctgatatgtaattaatattagactggttttgttgtatatttttgtatggagaacaactttataagtggaacacgataagcagctaaaaaggtgtttagcatatatattttcaatagaaatttagtggggttgtagatttgccatcgatgtgcctagtgtgtgtgagtgtttcatgtaaacacaatactataggaaaattttaaacaaaagaagcagtactaaaatactatagggttacagcgatgttttgttttgggatttgaattcttggtagatatagtcaaggctactattgcatatagcagtgttggttaatgggtgctgtaaaaaaattgacattgcaaataagcatttcctggagagcaagtaattgaggtgagaattgtgtgtgaaactcgggcgctttctaaatagatgttgaaaacttgcacgcaaaaggagaaacgtgattggcatataatcagtttagtaagaaatgatcaataaatttatttggatttttcaaaacaacttctatataaaaattagaagaaaaaaacacacactgtttagcagctttaaaatcgtgctaatgaaaatcgagaaagtagccaagccgaatcctggtttagaacatggcgtaattaattagtggttcgtgtgctgctgatggaggtagctaaaccgaggctggaaagggaaagagagaacaaataatcaagggaggatggagaggcgagtcgagttgagtttgtagtttgtagggttgcgccgcgcgcgtacgtgtggtgagagcaacggggggatggagaggaaggggatgaggtggattttcttggaaggacacgattggggcgaaccaatggccagcagaggcctcatcctcgtctctccctatcggggatttcggccccccaaaatctgcagcgtcgcgccgccatgtcacccccttgcgcccccaccccacccaaaatcccctcgtcgtcccgtcgcgcgcggccgcttcccctgcccccacaaagggtatgcgtatggccttggccatacacatctcggcctcctcctatcccgtccttggtcgcgctcgcactcgcactcgcgtcgcgtccatccatttctcaccgcgggcgcgtgtgcggcagcgcccgcagttctccgcacggacggtggctggtggccgacgtttttcaccgcgccggccgccggggcccggggccaggctgagcggtcggtgaggcgtaggtgtaccgttcaaaaagtctacctatgccggccttggagcgttgtgctggacatggacatggacatggccatgaaaactctgcccttctctgcagctttaatcgagcagagcagaaaaaacgaggcaatgcgtggaattctgtgaggagaggcagagaaaacggagcatctctctcggcctctagactttctttttgggcctgaaaccacgacggccctttgttccctcgaaaggcccatcacgcgtcttccttacgtgggccgttgccttatccagcccagaaggccggcagccgaaattgcgttcttctacgtgggaggaaaaagtacacgaaaaggtccctcaacttatcatcaagatacaaaatcatccctcaacagcaaaaacatatatgcggcatccttacttaacaatcggtcacaataaattcttcagtggttttgattccggttttatcctacctgacagctaagtcagcgtgggatccacgtagactccacctatcaggatgctacgtcatctctctcccttcctcctcctctctctctctctcctctcctctcctgtcctctcctcttctcttctcctctcctcttctgtgggcaagccggccggcggctggggaggaggccgccggggcgaggcgggagaggagggcggcggcggcagccttcgcagtgggggaagctgccgccggcggacgcgtcgaggtattgctgcagcggaggaggacgacgaggaggagatggggctcgtgaggtcgagctcggtctccgcgacggcagtggaggaaaaagcggcggccgtgacggcgaaggcgtggtggggttggcacttcccgagcccgctcaaggcgttccggcaccggagatcatcggcgagcatgccggagtgaggggggattacaggagatttttccttttccctttttttggcttcgcgtgctaatcttatgattaagttagaccaaactccaaagcctgtgatttgggcgtaatgtgtgcatatactcctaccagtggtgttgttcattgttctcttcgtgcttttgctcctttttagagtgcttgcaaacgttgtagcctgtgtacatcaaattgggaattttaaggtcgctgatttgatctgcaccaggagtttcttttttctctttttcgacactgacggaatgtagattgtgcgttgtttttctttcagattggagtgccggtggtggccatcgtcctgtccggcagcgcggcggcgcccgacagcggcgtcgacggatcgtaccgtcggacgacggaggcgagcggcgaaaaggctacaacgttcactggcaagcggcgagcgggtgggcagcaacggcagcgcagctacgccgcacttggcaagcctcacgttcaccgacttgcccttcgccaccacatagatgttgcagtagtccgacgcgcccttcatcaggctgcacggcatggcggcggcaacgaggatgcgggcggcggcgttgcctccgccggcgcgacgccggccgccggacctcctcctctgccctccccccctcccccggcggcctcctccccacagcgccgcccgtcgtcggcctcagaaaagtgagagagaggaggggaaagagagagaggtgatgacatggcttactaacatgtggggcccacacgggtcctacgctgactcagccgccatgtaggacaaaaccagggtcaaaactcaaaaccaccgaagcaaacggttttgtaagctgagggatttcatatatccggttttgtagttggaggacgattttgtaactcgatgacaagttaagagaccttcggtgtactttttcctacgtgggatgctgctggtggacggacacaagacgagacgctgcccatccgaattatgcttatgaaacaaactgataagtcaacttgacctccctcatgtcttgctcgtattgaaccatctacctcaattgtaaaatcggacttaatgtttacgccataatttggctcacggttgatttcatttgagcaggccagattatttagaatagttggtgcaatcgttgggtggtgtgcttaagaattggttagcttgatatgtgcaggaatttgtgatgcacctgaaggtgtacgagttgctggggagctgcagcgtttggatcggcgtggtgatgcatgtgctgctacgaccgggagttcctgctgtgcattgtgtacatgctggattgatttgatcatatatatgcattcagagatttggtgatgaagctttgatgattgcatgccgaataagatatagtagtattccatattttactagttggtttgtttagattgagtagtatacgatgcaccatcctgtcaggcgaggaagccatccgtgaagtaggaggccagccgtcaccttacttggctgtacccacattgcccacatcattgtatctgcacccgacttcaatgggggacctctttcaaggacgagcgtgtggcgacatgtgctacagcggtgggtgtcgtcgccacaggcgatggtgataccctgtggctctctccccgcctctctgggaggaaccagatgcgtcaccagaggtcaacgagatcacgctctcgatggaggtgttccttctatgtgtcaggcccatcactgcccacttctacccgtcgaccgcgtcctctggcgcagtgacggacccctccagtagaggcgacgccagagcaacacatggaggtgccgctgtttggggctcgagagaggagtaggctgaaaagtaggtcccactgtattttttaaaaaattttactcttatcacttagatatggatcccacttctatttttaacctctttaatgaatgggttaccttgttagaacaggggaccaagtcaacctatcacataagcataaatcgtttcccaaaccacagaaagaagtcgatttgtaccggtttttgaaattgagggagacattatacctagttttatgcttgagggatgcgattcgactagagcaagacatgagggaggaaaaataaacttattctgcctacgaatcatctgtctttcacattgggccaattatcagcactgacaaaagaggcttatactagcatgtttgcatagttatatttttcatagacaatgccgaaagagagatgatttttttttcttttttagattacacggtagacgcacacgcacgcacacaacactatagatgcaacactacactcacacatccttgaatgcgtctctgatacccgttcctgatcttaacaaatttatgttgaaagcccatttatatgtgcgtagtacttgtggaaactagaatttgaactgatgtgtaaattcatacacccacaactctaccatcagtccatcacaccactagtgtttctcctaaatcaggatatgatgaactatatataggtgtttagagcttttgtggagcttaattatggtctaattgaatggaccatattatatatgcatgttatttgtctttaaaagaagattatattgtatgtcagaatagagtttaagtgatacaaaagctatatacaagatggaatcaaggggcaggtaaaggttcgtgctttaaggtcaaactcgtggtggtggtgggggggggggggggaggggtgatgttgtcccctcctcatgaccacactagtgtctcctcctccatcatagggcactcgtagtgcgtttcacccatatataagacctcggagtgccacataggctccatgggttcaaaatctgggttcttcacagtgcaattggctataggagtgattttaattttatatttcacccctaatacttcatgtttcagttcttatgctttttctaatttacatagaagtaccaaattacgtattgcacaccctaaaatccagaaaagaatataaaatccactcaccaccttctctctctcccttatcccctccctccctctcagttcccacaatgcacggcacgacgaacagcggtgacacccgctcctctccgtcaccgccggccacgaccctcttctcctccaacccagatcaatgaccctccacccttagtgcaccgatgagctcgacggcgtggactcggtgtgggagagagggatggcgggagctccgtggcgcagatctagcggtgggatgagctcccctctctgtcggaccgcgtcactgctgcctctcccctctctctcaggcaatgactcatgtcctcaccatcggatggggtggatctagcgagcgtcacctccatctctcttctcgatccgaagttgtcggatgctggctgtcaatctggcgctgcaggagaacggccaggggcaagggtgtggtgctgttgggcaatgagcagattgggctgatcagctccaggtcgtccccacccacccaccctctcccctctctcacacacacctcacacgcttttggccacgaggccatcgatagctttcctcgatgaaactgttttttttttttgacgaggccatcggtactgataacaatccggcccaggtggggttggccgagacccaataacttaaggttgctcggaccccaacagttctttggcataagcccgatctccctaaaagactagtccaataggggaagagtggcttgctaagcaaggtgagattatttagaggctcacacggtcgccgcccgactttagcgtctttgccagcgggtaatagtggaggatgtcctcatcagataccaacagaggatgcgaggactccacaaaaacatggtccccatcccttttcttctccacacatgcaatctgtctatgtggacaaacaatgccactgtgaaatgaccttacattcttacccaacattgagcttggcgtcaaagcaatgttttgttgtgtttcgctccttccaaatttcgcggtggctactaatatctattgaattgatatgttctaagggctgggcgtgaaatccacatgtaggtaggctgatttgtagtaacaaataacgaggagagtatatatgcactgttgaacggaaaatcatgcgtgcgttgaacttgggagtcatatataaggaccacaatgcccctgcaaatggacgaagttccgtttgtctcctaccttttggaccccagcaagagcactgtgcacagcatcgcacacacaaagctggccatatcggtgcatcggccattgggcctaacagtgtcacatggccgtcaacaaacgccaagcgacccaccgctaaaaacacaacacacggccgttttcagtcggccggcttgtcagccaggatgtgtacaagcaaaaggtcctgcatatgtggatattagtgaatttcagccatgcataacttaagcctaccctaatggattatattcatgctacgacattgtcaggtgtataggaattgctagatatatcttagatgataaaattactaagaatctcagtcacattaaaacctagcactagattgagggaagaaggggaggaactcaccaacaataatgacatgaaagtccgctagaaaaaaaacctagagtttagattttggggcgaggggtgacactgggtaacgactacaccagcatgaggatggtggaggccgtaggactaagaggagatcgttataatctctttttcactcttgtcaagtatttttactttcctttttctagaataaacaaaccttagagaaataactaaataattctctcgagttttcctttcatttgctcaatttcgtatttacgatttctcctatttagcttctttttttttttaccatttcagagttttcccttggtctaaatttgttatcataggataggtcaaatcttatcctagataggattattttgggatgcatgtagtagttttttttttttgataattttctttaaaaaaacaaaagcagtgccccaaagagagtgaaaactaaccaagatgttacaggatttccatataagcacttagttttatactgcatacattagctaagcacaatttaatacaatatttaagcagttaataagttttccatagtcaaaattgtgttagccattttttagcaaataaggctagagttgattccttttctggttttttggttgggagaaagctgtaattttatctcgcaacttgtatgcgaggacgctttgattgagtaatacatttctttcttccaaataaaaatgcagcaaattaaaacccaggcacccagcctagaaaaaaggcactgtcgacgctcaccagttgatgcgatggtgactgtgcaaagtgcaaagcacaccatgcaatataatgcaacatcacaagaacgcaggatgatattggctctgctggtccctgcttgatcttctttgacgtctcgtccattaacacgataaaccgctcgctcacacagaagattccacctgctgcacagtcgcccccacctcaattcctccgatccgtgaacccccaattccaagaaagaacaaagcaaaaagtctttttctattttacaaggtaaaatatctttgctctttcatgttaagggttaaaaaaagaaaagtgaattacactttgtgttagaggagatagcgctccagttttgagcagcaaaagagctggagctcgagtgagcttagggaggatgggtggggattccctggagttcactccaactccacccgatagatatttgatcaaatctcagtcgtctctgtataacaacggttgggatgaactaactaattcccactagtttttttttcttcatcctaatatttgtaacaaatcaatgaatactatatatctatatatctaaagaatatacaaactaattttacttgcataacctagaaatttcatggttcatccacaatataaaaatcatattgggcttgtggctctaatgttttagcaatatgtttgtgtgtatattgtttatgcatgtttgcacgtactaaatgtttaacatagttctatacatgaccatagcttcttgtttggagaagaagagagcgtgcaaactttgttaatgttgttggcagaaacatactcattaggaacataaaaagaagaaaaggtaagtaattttcattcaagcatatgtgattgagggagttaattaatataagttaatacgtggcttcatcttagccataggaaacaattgatgtcatggatttggtcaaatccacctggtgaagttatagctaactctaagggatttggaccccatggaaacctcccctttctcgttttatttgttgccaaagagccaacttttttttaaaactaattttttttgttgccaaagagccaacttttttttgaaactattttttttatattttcaataagcatgagtaaaaacccctagacgggttacaagaaaagaaaaataaccaccagttggctgaatacacaaagcacacgccacaactcgctaacaactaaaaacactaacagagcccaacataaagtgtcgattccagacttgaccacgagcagcttaggaggttctgactttacaatcgtgtcatcgttgccaagcttgccgccaagcgacatagcaactctgacttcaagatgcaacatcgatatctagcacgctgccaatgatcaagaggcctcgacatcccacaatggactgccagaatggtcaagcgaccttgataccaaagagccaactagagcttgagcttagcctgctctgctttgctcagactttgtttggtctgagaggagagcaggaagagacctaaaagatatggataacaggttgaaatagaaacacttttgttaacttagctggttgaaagtgaaaagtgttgttaaacactagtccaagttaaaacattagtaaaaaaaagttgtccaatatgcaattcaccatattcatatatgttatgagttgtttagagtaaatcttttttttttcttgtcatgcatatgctcacacaccactacatataaacatctgagagtatgtcttttaataaattgaaagccaatacgcacatgcctaatatttgtagacatcttcttctatttaaggaaaataagccttaatggatagtcaaaccgttgtactcttgtgcttctcctattcatttcggagtaaattaaatgagcatagggaaacatcgcacttgtggaggtaaataattatatacacacgggtattgcttttcaatagaaatttgaagagtgcatgaaagattactagtgcgtgtagtggtgcatccgcacgtgtctctcctatgtaagccaaaaaaaaagtgaatgcaacttttttatttttcaataaaggcaatcgtgttatgtcacattgatcattttaaaaaatgtctattgattagtacattatattataaagagaaggtttgccattttagccaacaaagcttcattaccatgttgatcaagaaagagtaaatttcatataatgtatcacgtaactatagatttaacattaaatttatcacaaaactacaaatttaaggtggaatatcataaaactacaaatttatagtaacaaagttatcacaaaactaccgattgccaatttaatcataaaacttgaacatttataactcaaatataacattagtgctaagaatttaaacttcaaaatctatagttttgtgataaatatattactaaatccatagttttgcgatacttagccttaaaccggtagttttgtgataagtttatgttaatctgtagtttgtgatacattaccttaaatatgtagtttcgtgataatttagctcaaatatatgtagttatgtgaaatttactcttagaaaaagagagaaagatttacactatccgatcagggtgagtctaaattataataacgatatagattttctcaatatagttacataaaaaataattatatttaaatttgctttcaaaaattgttgctctaggaaaacggcgtggagaaatcagctagtgaacttaaatagtactccctccgttttttaatagatgacgccgttaactttttctcacatgtttgaccattcgtcttattcaaaaattttatgaaaatgtataagatataaatcacacttaaagtactatgagtgataaaacaactcataacaaaataaattataattacataaattttttgaataagaccaatggtcaaacatgtgagaaaaaatcaacggcgtcatctattaaaaaacggagggagtattagtacgtatgtacaatgtataacaactcagtcatcttacacctgactgaatttaaattctacaatctacatggcagaagtccatattttgcccatgtatatacgttcaaaacataataccagctggagtgcatgtagagatcttttaatttggtccatgccatgctgataaagcatgtttcttctacctttgctcacgatcccaatggctttaattatgtaccacgatgagaaagcattagatgcaatgaaacgcaagaaaaaagaagatgataaaaaagcagcaaatgaagggcccctgcctctacgccaaatctggtggtagatcaaccgcatgactgtcatgttaattaagcaagaaattccctttgcatttcatctcggtagaacacctgcctagctttcaaataaaaggaaggagattaccttactaacagcatgggagaaattttgatttttatttttaccattctgacacacctgagttgaaaattgcgaaatggagcagccattatatatgagcatgcaagatctgaataaaagcttcactgctttcactggagaccaaaactggctctctttcacaagacattctccattttctttcttctcttcactcacactcacactcacaagagagtaagtgagctagcgagtcacaggtttgctccaaagctgagccaccccatcccatcctctggactcatctgcttggctctcctcacaccacccttggattcttgcacttgggagcaagctatagctttgctttgccttcctctcttcaaccctcactctcagcattgttaagctcaggatttggccacctttctcctatagggatcacacaaacaccggtagaaaaaagctcttcttggagctctctgcttggcctctctctctttagtttagccgcaaacaatttcctctcattttttctttgatggccgcgttgcatgggcatggcttcgcggtcaccgtgctactggtggtgttgttggtgcaatgtgacgcggcggaggcgacgacgtgcgccggtgcggtgccggcgaggccacggccggagacggtgtccatcgccgagttcggcggcgtgggcgacggccggacggtgaacacgtgggcgttccacaaggcagtgtaccgcatccagcaccagcgccgccgcggcggcaccacgctgctcgtgccggccggaacgtggctcaccggcagcttcaacctcaccagccacatgaccctcttcctcgccaggggcgccgtcctcaaggccacacaggtctcactctcacctcgccaccgccatggccatgtttttcttttcctctcttcttcttggtggtgagtggtgtcgttgacatcgacgcaggagacgaggagctggccgctggcggagccgctgccgtcgtacggaagggggagggagctgccgggggcgaggtacaccagcttcatccacggcgacggcctccgcgacatcgtgattacaggtgaagaattgaagctcagcttagctcagctccggtatttctagttgttgcatggtggtagcttctctgctgctcactttctcccctgttgttttggtatactgtgttcttgtgatggtcttgattgtcaattcttaagtctcaaccaactaactttggtctcctggtcagagaatattcaaagagacatgcatacatcctgcaaaaaagaattctgcacacaccgaggaaaaaaagattatatgatagcatgggagtgagtgactaaaggaagactactttgttgcttacacgcatcagacataatagggtaataaataaaaggaaccgaaaagataatagacctagttaacgcaactttagataaatagtagtaagggatttgtccatcatggttaaaatatgtactcttccatggtggtttgtcagaggtttgttattttaaggtttaggccattactgagagatttagaatacaaacataccttggtgggtagcacggtggacgacctgttgtcggtaaagttgaatcttgctcctgttccatatctagtggatgtacatgcatgccaagaacaggaaatggaacagtgaactgatttgattctgtaccactctggtacagtttacatcacttctactattaagttggtgactggtttaagccagcattatatgctcaagcagacaacaagcagtcaggcttactctcaccaggcaactgaactaactgtgctcttatttcgtctgtagcaattttctctgactgttcctgcaaaagaactcattaagattgatgcaagtaattaacatgtcagattttttttatattaaaaaaaaaggtgacaagggaatcatcgatggacaaggtgatgtatggtggaacatgtggaggcaaaggacacttcagcataccaggcccaaccttctggaattcatgcattccagtggcattcacatctccaacattgttctcaagaattcacccttctggaacatccatcctgtttattgcgagtaagcacacgcttgaaagttgaaatgttcatctccttcctgcaaaaatttgtcactgcttaatatttctttcagagcaatgttggaaggccgaaaaatagttgatatgtgaaaatttcaatacaatccattatggaatagttaccagaaataagaaatcttgtgacacagctacaaaattcttgagaatgttcagtttcaaatgcccatttatgctgaaatactgatccaattcattttctacacccagcaatgtggtcataaccaacatgatgatcatcgcaccacatgactcgcccaacaccgatggagttgatccaggtatgcaaattcatcttaagcttctggcacacaaacaaaccacatataaattgattaatttttctttgctacatgcctgaccatccaagagtacatggaacatgctaataatactgaatcctcccacagattctagcaccaacgtatgcatcgaggactcctacatctcaaccggcgacgatctcgtggccatcaagagcggctgggacgagtacggcatcgcctacgggcggccgagctcgggcatcaccatcaggcgcgtcaggggctcgtcccccttcagcggcatcgccatcggcagcgaggcatcgggaggcgtcagcaacgtgctggtggaggactgcagcatcttcaacagcggctacggcatccacatcaagaccaacattgggaggggcggcttcatcaggaacatcaccgttgacaacgtccgcatgaacagcgtccgcaacgggctgcgcatcgccggcgatgtcggtgaccacccagatgagcacttcagccagctcgcgctgcccaccgtggatgctgtcagcatcaagaacgtgtggggtgtcaatgtgcagcagcccgggtcgatcgaggggatcaggaactcgccgttcacgaggatatgcctcgccaacgtgaagctgtttgggtggaggaataatgcagcttggaagtgcagggacgtccatggcgcggcgctgggtgtgcagccggggccgtgtgcagagctcacgaccagcctttcttcagggttctgcagctattagtgtgatccagttgtataatgttttttgattagaaaggttgtgcttgctttttttttaggtttgactgctccctaattgtggttgggattgatcaatatgttaggcttgtgctaatcagttaaggagttttaggtgtctttttgttagagaaaggtttggcttctaagttgtcagtctgagtgcaaatatgttctaatctgaataataaatcccagcttgtgtgagattaatactccgtcagacttgtgatcaaatgagagttgaatgtgcacatttttactcctaatttatctgttggctgttccacaaacaattctagggtcatcagaggcggctcaatggatgaggaaggaggctctctgcaagaggcgattagattttttttttttgagaccaagaggcgattagattgggtctactcaatcagaacaaaggatataatccaacagctaacctacaaagataagtcagtgtgcgtatcaaaaattggaaatggataggatatggtacaagcactgatcgaaaattcctgtttcgtttgtcaggtacttctatatgattgtgatactgacataatatgtgctactaacattctcatttggacaatttctactctgataactgtactatactttaggaaatgtgttctgaaaactgtggcagcaaatcttccagttcatgatcctaataatgatagttcaatcaaagacactaacaacatctaaaatcaagatgtaaatggaaacaaaaacactctggacaggataaaacaaagaaaaaagggctgcgcttcaaaagtaatactcccgggataatgtaatccctaatcttactgctctaaattaaacccccttttccactgacgatgattaacaaaagctaatccccagatacttgttaaacctgctattagtccttgctacttatgcatcatatatataatatccagaaattttagtactctagcagatagtatgattcagcgttcgtacccatagggttagctcgcgatcagatctcgcaggcgcagcgccagcctagatcggatctcggcatccatctcgatccccctaatctctcgtcttcatcctcctcggcaagctcgtcaccggccggatcgagcccgaaacggcgcccggatccagccgatccgccgcctccggggaaccctccatcgacggcggcggtgggtggggacggcggcggggatgggtgggtgggtcccgctcgtcggaacgggacgaactgctcactagtgggccccaaaaatgcccagatgggaggagaggtcaaacgggctgttattgggccgggtccgtctggccacctcgatctgatccgatccgtttaattacggtttcttttctctcttatttctataaagctaatgcccactaaacacctaaatcttaacatgcaagcatagtatttattagcactcctaaaacctacaaacaagtatgccacatcaacctattaagcacacaaagcttaacatgcaagcctacagtaattatatctacactttattttattttattctaaaattaaacatacacatgctaaatcatcattctcaaattattttcataatatttcaatccaaatcatttcatcatttctctaatattctaatatgtatcccgcagcaaagcacgggttatcgtctagttattattactaggagtatcttagactaaacattagcttgattaagctctcaactactccataataataacattacgacgtgatgatcctttttgtttgaaactttacaacacgtacgatcttggtttggtcagtctggaatggccggtggttcccttgtcaaacccaaattgcgcacgcaatgacgtatatatatcaggaatcaaatcaaatgctcttccgaggcttaaaagattcatcgaatttttaaaagataaaaaatgtcggggggaaaagagtgaccttaccattggttaatcaagcatggcacgcatttttctactcttgtgttctccgtcaggttcgctgatcgatgtgtgtgtctgatgtaccaaattgttagtggtatactagttttttttaggggatttttttttgaggggaagttagtggtatagttgcaatcaaatgctgttagccggaaggataaacaatatgtgggtggatcgttgactcaaatcatcgtacatctagctgtgtgcacgctcttgtgcagagatggctcactgataaaaaaaattatgaggatttgttgtacgacaaacatatacatatggagtactccatgaagaacaacctaactgtacacaacagaatagtattaaccaaacacattcttcactttggccttgtttgaatcctctgtgctattaaatatctctacggaatcttactatttagaagtattaaacgtacattactgacaaaatccattccataacccctaggctattttgcgagacgaatctattgaggtatgttaatccatggttaatggatgatcactgtaacccactggtagagaaggagtttttactcccggttcgtaaccccctatagtcccggttttccaaccgggactatgaatccgagactaaagatcgctatctttagttccgggtgaaaaaaccgggagtaaaaatccattttttttcccggttggtgttaccaaccgggactaaagatactaacaccaaccgggactaaagaggctagatccggttgctactttattctatttttttctttattgtttttaatatattgattcactctatcccatcccaaaatcccaaatcaatcatccccgaatagtctctaaattctcaaatcaatatctctaaatacatcacaaaatcttaaaaaaattacatcacaacttctacaaaattcatgacaaatacatcacatattcacatcacacacaaatcaaatacatcacacacaaatcatttcagatccgaatcacagattctcaaaaaaaagaaagaaaaaaaagaaagaagacgaacggcttgccgcctcgccgaccgccagccgagccgcccgtcgccgccagccgcccgcacgccgcctcgctcggccctccgtgcgccgcgccgccgcgccggccgctagccgccagcgcgccgcctcgcccggccctccgcgcgccgcaccgccgcgccggccggacggccctccgctcgccgcgccgccgcgcgggccggccctccgcgccccgccgttgcagagggaggtggggaggagggagaggaggagaggaaaggaggagggagaggaggagaggaaaggaggaggagaggaaaggaggagggagaggaggagaggaaaggaggagggagaggaagagataagggtgactctgtgaggagatgagttaaaaaaggagaggaggagattgtattgatccgatccgcgtgcaactatcccgcttatgtcgactttattcccggttggtgttaccaaccgggactaaagatctttagtcccggttggtaacaccaactgggagtaaagcttatatcgatcttttttcctggttggtgttaccaatcgggactataaatagatctttagtcccggttggtagagcttttaaaccgggattaaagatatttttagtcccggtttttaatataaccgggactattgtgaaaactggtggaccgaccaaagatggtttctccaccagtgaaatcacggatgatacaatcactgctcgcgccttctgctgtcggtgctccatttaaacgcggaagttaacagtaattttacatgaactcattctttttaaaagcataaagtgagactatataatacctcaaattttgtgtgtgtgtgataatgtttgctgagatgacagttaatttacgcataagcccatgaaggatggtaaaaccgaaaaaaaagcattataagctaacgaagatgttatcaaagagcaaacccgaaagggacctcctaaagatggaggctaacactactgccgaagagaaagaatacgagagaggggtttgctattcagcaactaatttaatcagcactttatgaatgaattcaattataatgaagggcttgtttagttcaatgttaaaagacaacttatcatttattggtaaagccaaaatttggtgtttaatttaacaccttatcaaattttggtatatagttttgtgaatagaagtttgtagagaattaccaaattttggtgtttaatttaacaccttatcaaattttggtatatagttttgtgaatagaagtttgtagagaattacccaatattggtagaaattgggaaagttgcgatggtaaaaatcttgtttagcttgttactttactaaaattcagcaataccaaaatttggtttggttgattttgacaacaaattgaataagcccaaaatgtctgtaattttcttcaatcaaaaggaggctttggtgattgaacatagggaatatcgtcaagagtatgcggggagttcatatatgcccgcttcaaagtcaagatgaaatatcacaaaatctatttcgagaggcatctcgatttagaattaacgagcgacacggataattacgtgagaagcactagtagcgttacagacatgcatgcaagtagtttatgctattaggttgtgcatttttttttcttcttataaaattttctcttaaattacttattcgatctataatccgattacaccattgtattcgttgcaattaaatctttatatcaagatcttacatgataatattatgatgaaaaaacatttatgttgtaaattactttttattatatatgcaaattacttttatcttatatataaattacttttagatttgattaaattacttctcgtaatttcataatgctttgagttgattacttttatttttttttactcaattccataatttgtgctgattaaatttaatttctaaatagacttatatttttattcctacgataaatttacttctaatatcgtaataacttactgtaataacttactttcattttatgctaagttacttttatgatttatgtaaattactttcaggctttattaaatttactttcataaatgtatttacatgaaaatcttctctacacttttgaatttactccacataagtttcttactggaactcactcataacgtaattacttctaatgctatatagagttacttctattacatagctaagttacttctataatttaaataaattacttttaaattaataaaatgttttaatttattcaacagggatctcgttttgtcatatattttaagtggagtataatgatgcaaatagatcttaaaaataatatgtgatttaaaagatacaagtgattaaagaggtaaaaaacgtgcactatagtactttttaagctaaaaagagatttaaatataggacggagtgatcgctgctttatgcaaaccagagaccggtcgctgtgtagttatgtccatgaaatttaattaagcaggttaagaacgcccctgatttcaggaaatcttgttggtgactgccagaatcaagctagcttgtcagtcgtctgttttcagctgagtattcatgcacgcaatcttgttgttgcctctctgcgattttgatcgtagcggttttcagacaactgaaatggtttatatagcgatcgagcaacatttaatttgttacatagaaacatgattaattaatgcacgcatttgaaataggagaacaatttattaacatccgtgacacaaacaacaacatgaacactcgggataagtcgagagtaccacaacacaaatacggtatacgaaatacatatacggccgtagaaaagtagaatacacagcagccatatgaatcatgaatgaactcgacacaacaacacaagcagacgatggagaagaagaagcagcggcaagctaggctgatcgatcgagagacctagaagcggttcacaaagtccttgagccaactcatcaccccgcctttctcctcctcctcgccggcggcggcggcgtcctccgcgcggtggcggaagctgaggtggtggtggtggtggtggaagcggcagccgcggtggtggtgcatcctgctgctcatcagcgccttcctgatccaccgcctcgccatctcctccagctcgcgctcgtcgtcgtccttgtggtggtggtggtggaagcgcttggtcctcatctcggactcctcctcctcctcgtggtggtggcggaaccgcttcatgggcgcaccctcctcgcgctgctcgtggtcgtcttcgtggtggtggtggtggtggcggcggcggtggaagctgatcaaccgctccacggcgggcgaagcctcgtcggcctgctcgtgctcgtcctcctcgttctcgtcgtggtgatgatggtggtggcgatgatggtggtggtgggagcggcggccgtggtggagcctcgccatctcatcctcgtcttcctcctcggcggcggctacggcggcatactggcggcgcgagtccggatctggctccgcgacggggagaaccaccccctcctcctcctccctgcgctcctcgccgcgggtcgccggctcgactggcatctcgaacaccagctgctgcttctcctccttgccatggaatccctccccatggcgatggccgccgtggcgcatgtggtggcggtagcggcagtggtagcggcaggggaagcggaggaagccctgctggtccgccgcgtcgtcgtcgaccgggatcacaggcccctcggggctcgccgccgccgccgcgggctcgtcacgggcggcggcggcggcgtcgaggtagggcgggacgatggcgacggacgtgccggcggcgtcaccaccattgtgctcgacgtaggcttcacggttggcgtaggcgggggcggtctcctgatcggcctcgccgtggacgacgcggcagagggcgacgaggaggagtgcggcggcgacggcgaggcgggccatggcggcgagagatcgagcgcggcgttgaccgacgagaggaggcggggggcgggggcatttgctttgtaggccgcgggtggggggcccactgatgggctgtatggttgacgtggcactatctgattggtttaacaaacgagttccaagttaaacactcagacgggttagaggatagtacgttgcactttgacattttggcaacttgtaactcacgtagaatatgttgtaccatatgcatccgaataattcaggaaaaggtccgcgcgtattgcgcggctagaatcattatattttctctcatataatagcatatatgttttctaaatgtattattcaaatatattaaaatggcaacataatttaaaattttgtactaactttacgaaactactcatgtgtaatattcatattgtattttatatacgtgttagttattaattattttcaatatcaaattttagttatttataaattatattcctatctgaatttcaatatttcttttttttattctgaatttttgttttctaaaaaatgtatttctatatagactctaggctcttcttctaatattatttatttttaataatgaatttttattatttctaattgtatttctatgtagactctaaattcatcttacaatattcaatttttaatcttgaatttcagttacttctaaattgtattcctatattgactttatactcttcttcccatttttttcaatttcgaattttagttatttgtaaattatattttatactaactctaaactctacttttaattttattatgtttattctgaattttaattagttttaaattcctatatggactctatactctacttctcatattccttatttttaattctgattttctattatttcttaattgtatttctacatggactctatactctacttctaatattccttatttttaattccgaatttctgttatttcttaattttatttctatatggactctagtctcctcttccactattccttattttttaattccgaattttaactatttttaaattgtatttctatatggactatgtttttctttttctccgattaatatggtaatttctaggccgtgagagcgaacgtgaaggctcatttttctgttcctttaataagttaatagatgatagaaaaatatgttgagagataatattcgataactagcccccgtgtgtgtatttcacttctagaaaaaaggtttttgcaggcgggccaaatccgtcttttcaggcggaccggtgttccgcctataagcaaatgactgtgaaaatagataattttcgcaggcggatctgaggtccgcctgcgaaaatcaatttttgcaggcggacggcatcttcgcaggtggcagattcactcgcctgcaaagcaaatttcagcgaataaaaaaaagacgccccaccaccgccgtcggtctctccctctagctgacgacggctctcctcctccatctgctgccgtccccacaggggttgctgccgtcgtcgcatcgtcatcgtcgtcgcgtcgtggtcgtcgtcgttgaggatgaagctggtggcgccgttgtcacgtcgtggtcgtcttagcgtcgttggcaccgtcgtcgtcgagagggaggaagctgggggcgaggagggagccggtggcggagatggagccgacggcgaggaggggaaccggcggcggaggcagggaggaggggagccggtggatccgccgcttcatggtgccgcgaacgtcgtcgtcgtcgtcgcggccgaggcgagccgacggctcgcggaggtggcgtcgcggtcgtcgtcgtcatcgaggagggcagccggcggcggaggcggggaggaggggagccggtagatccgccgcttcacagcgccgcgaaggtcatcatcgtcgcggccgaggggagccgacggctcactgaggcggcgtctcatcgaggagggagccggcggcggagacggggaggagggcagctgacgacggaggcggggggaggggagctggtggatccgctgcttcacggcgttgcgaaggtcatcatctcacgaccgaggggagccgacggcgagcggaggcggcgtcgcggtcgtcgtcgtcgtcgaggagggagccggcggcggaggcagggaggagggcagccggcagcggaggcagggatgaggtgagccggtggaggattttttttgctaagtgtgtgagggagaaggagagagagaggaggggggatgagtggtggagaggagaggataagaatggtggaggagaggataaggatgacccttttttttggaggtgtgatttttgtagacggaccacataaggttccgatttattttcgcaggcggacctcttaagtggtccgcctggaaaaaatgattttcgcaggcggatggtgagctccaccccgatttacatttttctaggcggctatttagctccgagggtcatacccgcctggaaaaataaaaggccaacgttgctaaaaaaacattttttctagtagtgtttaaataagtccgtaaaattattcgtatattctttcgagtttttttaggttttttatatggtattattgacttttcaatatatatttgatcattaatttatcttattattatttttacaaatatgaaaaaactatttaatgacaaaacaaatgaataataattatgtatttttgctaataaaacaaaccatcaaacatatataaaagaattaacggtattaaatattaaaattttaaaactagagggagtaatatattattatgttgaggaatattacgaagtgaagagcaaagtcgtagaaattgactaaggaaatactccgttttttaatagatgacgccgttgactttttctcacatgtttgaccattcatcttattcaaaaattttatgcaaatgtataagatataaataacacttaaagtactatgagtcataaaacaactcataacaaaataaattataattacgtaaattttttgaataagacgaatggtcaaacatatgagaaaaagtcaacggcgtcatctattaaaaaacggaggtattataatactgcccagtactaggaatcaggtcatgacatatcctaacactaacagcacttcgcctacattcatcgtattctctattactcccttcgtcccaaaataagtgcagttttagcactgttcatgtccaactgtcgaaacaagatttcagcaataataaaagggggaggcgatcaagctaggaaagtggatgggtttggagacaaggaattttatataggtttaggccttcttattcaagaagtaataccctcctgtccggggatgattccgccgagtgtgttattgattctataaattggaaaaaagatcataccccgagaggcacacagacccctccttatataggggaagaggtccgctttacaaaatacagtccatatcctaacggaatataggattatagataaaatacaatcgtaaccgactaagatcccgggtatttctttgacatacaagtttagaatctaacccgagtccttatagagatattctatctatatttggtaccgtatatccgactaaattataactgtcatgtagatatggggtatccataatctccacactaacgtttgaccatttgtcttatttgaaaaaaaaatataattagcatttttattgctattacatgataaaacatgagtagtactttatgtgtggctaattctttttaattttttcataaatttttcaaataagacggacggtcaaaatgctaaacacggatatctatggctacacttattttgggacggaggtagtagtacatgacttgctatttcaaaaatagttttactgaagaaacgttgtaattagtttttttattagtgcccctcgcggtttactgaaggattctgtaattagttttttattagtgttcgaatatttcatgcgacaccatatataatatccgacaccactcgatctaaacatccccttcatctttgaaatcccaacaatagcggtaccattatcatttccgccttaaccattatgcttatgtttcccaaaataaaatatatgaaagaaatggaaatgggattggcagttttccgattgaccattttcatatccctgcgtctatgtgaaggaaacgctggcaaatgcaaactctccattcttttgtttttttttcaacgtgtaataactacacacaggggcctcgtctagagatttatttatctaaagtacaaaagtttggttggatacttgggtctctacaaaacgcatctacatagggggatgtttggatacagttactaaagttagttcctaccacatcagatgtttatatataaaatagagtattaaacatagactacttacaaaaataattacataaatgagagctaattcacgagacaattttttaaacctaattaatctataattagcacgtgtttattgaattattgtagcatcacatagcctaatcatggattaattagtctcaatagattcgtctcgcgaattagtccaggcttatggaatgggttttgtcattaatttatgtttaatacttctaattagcgtcaaacatccgatgtgacatggactaaacaattttagtcccatccaaacacccccttagtttgaaagaaccgggtggtcgatcagtctatatatagatgggtgcagagcaggtacaatagcagactgtaagccgctataaacacatattgagtatataaaagaggagagaagagaagcgggctacagatttgtagccagctatagcacggactaaaacacaatgtttgtatgacatatgaaaccttgtattaatagtgcaatataggtttataggtaactattgtatgaattggctattaaatcagttatagtactttctccgggctaataatacttatcgttttggacaagtgtgatgtcaaactttaaaatctttggttatttataatttgtaaaatatttgtcaatgaaatatggtgactatatgcatatattaatcttaaaaaatacttcaaaaaattatatatttgttaacatttatatatatattataataaaaaataacggtcaaagttattttttaagaccgtaccgttgttaaaaacgataagtattattaatccggagggtgtagttggctataccctaagggtctatttggtacagctccaactcttaaatttaactccaggagttgggtttggagtggagttgtggagctgactaaacccagcttcataactctagtttattttgtaagagagctccacccagctcaactcccagttttggtggagctaaaactatttggctgagctccaactctagaagaggtggagctggagctgtgccaaccatgcccttatcaagctccccttggacttcaattttgcgtatgcagtgacgtcagttaacgaaggaatattgagatcgaccataatcaaatccagatatcgagggtcgtgtttgcaaaaggtgtgtttagctaaccgaagttaactaagctaggtttgtgtttgcatgtgacacggtcacagtgagcctcggtccaaggaaggcccttatcctataatgaaagtactttactttaactgattaaccaaagccaaaggctggtaccaatcctaatgactgggctttacttcaattaatccaaatccggccaagcaaggctattttttaagataaagaaaagaatctcagcctttgcgactaaataagttagatctacttattatatatttcactcaatatagagcacgtaaaaaacaggaaataactaaacaatagctaataataccaatataaaatagagaatacatttattcaagtctatttaaaaatctccaatcggatttaccaaatatctgcatgaccattgtttctagatttcgacacatgcatagtatgtattagttgcttgaagctaaggctatggcttgattaattagttattgccaacagcttttacgaaagcagattcaggaattgacgaacgtaacactgccggattaaatagggcctagcaaaaccgaaaaaaagaaacgaacctaacgagcaaaattaccagttaaccgttgaatgcagttaattaatatggtcgaatctgattcgtatcctgatccataatatcagatatttcaacccctcaactattaaaactagtgcaatttgactcattcggtggttttggagagccgtttcgctgacgtgatgcatacgtggaggtgttgacttggtttttattccacgtggagttgacgtggcacttatgtgtattataatttaaaaaaatgagcaggacccatttgtatcacacaaatataaatgtgggccccacaagtcagccgtcttcattcttcgtcctccctctctctctcccccctcatccctctctttctcaccccctttctcctcccctttggaggaacacaacgagtagggacccagccgccggcggcggcgggcaggggccggggcggcgccggagctgcggaggaggaggaggatggactggtcgaaccttggcggggaggggccggtctctcatcgccgagcgcgtggcgggcttccttcctcggcggcagtggcggcggagcgtgcggaggaggatggattggtcgaaccgcttccttccccggcagtagcgcagagtagcgacgccgtttgccgcccgccgaccccgcccgagatgctgtggtgggaaaggagtgtatggaggcggagtaatgttcgcggcggatgaggagctcgagctccgcgacgtagaggggcgccgccgccacagctggggacgcgcggtgcagagcgctacggagtccgggagggaccgacgggcgggaggatgcgatcaagctcgtcgtcctcgccggagggggccatctcatcgggtgaagcctcgtcgcagaagttgccggcagaccccgtcgtcgtcgtcatttatggaggcatccaacgaagctcacggctatcgccgccactcccgcctctgccgccgctggttcccgccgcatgccgggagagacagacccacatgtcgcgcgcgccgacggctcccttgttagaaattaatcttgttgtttcttaatttcagcatgtttatctatatgcatgtgtgtattgcatggcctggcgagctagctatatgtacgtgggtgctgcatggcttagtgagtagtggttggcagggagtagtgagccaataaagagccaggagatgagagcacatgtatgtagcttagttagttagccatgcataattgtgggctagtgattagccgagtcttgcacaagattaggagtaggaagtggtcagtttgcatgcatgcaggttagttggttggtgcaagcaacgacgtcggcgaggactcagtacttgtgaagttgcggccaagtaaacaggacgtgggcgtcgtgtgtggctcgagaagcggaacaaccagcttcgtgtgtgtatgtgctgtgctcattgtaatcatttagttaagagaaaaaaccagtgaaaagggcacaagttgttttggtgccgcaaagatcctgtgtgtttgcttctgtgtttgtgtttcttcctcgctgcctcgttcagaaagtgtagcttgtattcgcgtgagttgctttgattcccaacatccctcgatctcgggctcctctctcccggcgttgccggtgcctccgccccctccctcccccccccctcccgggcggatgccgaagagggagagagagataaggtagagagagaggagggagaagggatagacccacagtgggccccacaaaatttccttttgtgtgaatgacgaatgggccccacatgtatgtttttaattgtaatgccaccctagcgccacgtcaatagcagactaggtcaacactgccacgtagacgccacgtcagcaaatccgttctctaaaaccactgagaaagttaaattgcaccaattttaacagcttagaggtcaatatatctgattttgcggtttagtgtcatggattagatatgggtcacttttaagggagtcaaagtgtacttattccttgatatgctaagccatgtcatgtcctgttgatccggcatgagagccggcccaacgcgggatttttaattttgggaataagtttaccggaggtcccttaacttaacagcgagattttttgaggtcccttaaccacaaaaccagaaatcttcacccctcaactttacaaaaccgtctaatttgggtcccaagacagtatacatggctggttttgatgatgtggcattctagtcagcaaaaataattaaaataaatatgtaggggtccacatgtcagtgagagaaaatgatgtgggccccacatctctttttttttctttttctcttctcttctcaacttctcagctctcacgcgcaggcgggaagatggcggccgacagcggagcgggcgcggttgccaacgcagcgggcgctgcggcgcgcggggaagaagcaggagagggggagaggaggcggccggcgccagagaaggggagagaggcggccggcgcgaccgcccgcgacggcgggagcggcggccggcgcgcgcctctccccatccggagccacggcgggttagcaagcgaacggcgtactcgctatcgccagccacgccgcctccacggcgccgcgcacctcctcggcgcgacaccggcagaggatgcggaggagagcggccggggtggacgcgtgcgccgatgggagcgccgggagagggctcgacgacgagcaggcagatgggcaggccgtcgatgctccgccgccgcttcgcctgcctccggaacccgccacagaatgcgcgtctgtctagccgacgcatcgcctccggcgtccgctccttcggcggcaccgtccccagctgccccgtctgcctccagtcgccgtcgtcgtcgttatgaaacacccattaattagtttgcacgctgcatgcagctagctagccaaccggattcatggggttgtccaccatgccctgcccgtccatgggctggtccaacacgggaggatgccgtgcttctccagctgcccacgcagtccgacgccgctcaacatcagcagctgcaggctccccagcgtcccggtgtggtcgcgtgcaccgatgggagcgccgggagagggctcggcggcgagcgggataatgggcagggaagggtcgagctacggcatgcgggtggctgcggccaccgcccgccgcaggctccgctctccgctgctccgcgtgcctgctcgcccgccgtcgccgctagtagccgcgctcgcccgtcgctgcctcccgcctgctccgctctccaacgctccacctgcctgcttgtccgccgtcggcactcgcagccacgctcgcccgccgctgccccgtcctgcctgcttcgcagccgccgactccgctctccgccgccgccactccggccgctttgctgccgcggcgactactgcagctctcccctctgcggcaagaaaagggaaaagagaagaagaaagagaaaggaagaggatgatgctgacaagtgggcccttactatttccttctcactcactcgtgggtgccatattatttttttattttttttgctaactaggacgtcacgtcagcgaaaccggacgtctatactgcctagggacttttttttggacggttttacataattgaggggtacacatttctggtttcgtggttaagggacctcaaaaaatctcgctgttaagttgagggacctcgggtgaacttattccttaattttgcgctagttgggccaacgtataatagtccaattttcagcccatgtccgcattgcgacctccctctcgtagttcagcccaagtaaaattttgggctcattacggtcgtttttaaagtttttaaatttggagctcactagaggacactgataaaagtatgttaaaatcagcatcaaatttaagttgaaaattcaattttggttttagctttggttttgacttattagagtataatcaatgagggtcggaatagattctgcttaatctagacgagactatcatcatgcaagtctagctaggtacgacctacgcgttggccgtgaccgcgaccttgaccttcatgcccgcggtgcagtggtcccggatgctgcagatgaagaaggcctcgccgccggcgagcttgatccggtcgtcgccggagttgtacaccttggacggcccggtcaccgtgcacccgccgtacccggcccggtccacctccaccacgttgtgaatcttcgcgtcatacttgaacactgcgtatccacatccatatgtatttatatatcaaactcatgatcaaattggattaagtcgtttttgttttttaagacaaatttaggtttgtccaactacaacgctaaattagttttattaaatatatcttgataatatttaaaaaatattatatttctataaacttaatcaaacttaaaaatgttcgacttctcttaaaagtgaaagcaaacttgtaatacaaaatacaaaagggagaaagtataaattatgttgctcgatcgagcatcgatctcaccaagctcgtcgccgggctggattcgcttgccgttctcccagccggcgacgccgaaggaccatcccttgttgtcgccgacggcccaatcctcgccgtggacgacggcgatggcggcagccgcgcagcaaagcgccagcagcagccccggcgcggcggcgcttccccgtgccattgatgctactgccggtgccgcagtttcttacgaattaattaacgttgtcacccgagctcacaagaacgatcaggtgatgtgatgatcgacttggctgctttccttttctaatttctagtatcgttttgtgtctataggggaaggctctgtttttatagctagcctgtatatttatttattagaccttactactagtgacgttggagagatatcagatatgcacattgaaatgatgggatatgcagcattaatagatccgtgtatatccacttgttaatatagagaccgacagtagtctcatctattgtcttaaaaatttgaaatggaggaaggatgcacatttattggaatagatatatccaactatttctaagagcaagtatcattgatactaatatgaaaagaagcagttcactcttttgctagatgcacccacgaaaacgcacatagaatgttatgcaggccctccctaaccattagatcatcctatccaatggtccagatataaaaatccctgatgtgagatgcgatccaacaatgaaatcacgcagacgccggatcattcctcagtcacgcatggcgcatgccgcaacttcctccaacgcaaacatcgcaccttatttcctccaatcaatcccccacacactgtcacccaatccactcagctgctcttgctcttcctgctccgccgtcacctccaccacgctgccatcgcttcgatctactcccctgcgcacccatcgacgcatttgctctccgctctccggcggtgtagatgcctctacaccgcccctgatacctctgcccttttcttgagcacccacatcggcctcaacacggatctcagtgtcgtggcggcttcattggttggagttgactaccatcattactcaacgtgctgcagagcgtggtggcagccctggtgctggggaacctgcacatgggctatcaatgagtacctagagggcatcgtctccggcgagtggctcgataacttctccctcagctacatcgagtacgtctacttctacttcaagtcgcaatatcgcatgcagatcgtcaccatcgacaatgttggttaccgtcacccactttcttgctgctctgcttcttgaagagttgtttggatttgatggttttgtagtggctaagcaaatgagctggtggccagggtggacatcaacgcattgttcgctgcgcagctagcaatctgacctactcgatgatgagagagatgcgtcagagtaaggctaaaagtggggtgggcctgccactaacccgctgggctagcccaccccacttacccactaactcacttatgtgcaacccaatagaagatatgtgagttaatgcgactgcccacagtggcccagtggcgccacaacccacttatcgcgcatgcaggggaggaggggatcgaatcacgctagacaagatctagagtgctgccggctcaaccctagcagccgcctcctcaacggcagtcctcagccactactgccgttgttgacacgccgtccattgatgcctctcatggccgtgctcatcttcctctcggccgacctcctccgcaaccagccatggtgacgccatcaccggtcgtggcgcccactctggtgcctgtcgtgacgctcactccgctgcccatctcacttcctccatcacccctgcttgctatggctcctaccagattggcttctccatccccattggtttctacgcaggtgagttcttgaatctttattttggcgatgcaatgatttttgcttatggctgtagaatcaaccccctattgttattactaaatatatgaatttcctttgttaaataactcatgccaatttagtacttgatcatggtaaaaaaacatacataatgcttggtaaaaaaacatacatgatgcttactggatatgtagtggccaaattcttgcgaaaaaaaaatctatagatggaattttctcatcaaacatgtgggggatggatgaaggacatgatttggttccatctcgtgcctacctttttatcatgataacgtctgaagtaagataatatactaataatcatgtctgctgtacctatatgattacaatgtgctatgctgaaatttaaccgtaactgttttggctatatagcttataccctgtccatttctcaacatagcatgctgatgaatcaataatttagcagaaacttattaccaaaacagatgttactgttccaattgcttttttcttttataaggtgaagtgttccctatatgctggtttgaatttttgttattagcagagtttatgcttacaatttatttcatggcagacaaaaattccttttactgttgtagatgttgcccattgtgcctcaaaagagatactctcctcaagtaccttaagggatataaacgtaaagcctcgatagaaaagcaacagactccggcaacaaagcggctcaaatcacctattgtataaatcgttagatctccggagattaggattgtgatgtcaccgtctccatcttttgaggaagcaattgaagaggaagcaattaaacttgacaatgtaagtattttgatccgaaagacatgatctttttctttacttattttttttcatgtaattctactgctatttattcatgcaattgatgcatataatttaattgaccgctttgttcgatcatgtgttttaatgtatgcttaattcaaataattaggtttatcatctataactaaaaacacaaattaacatcaactatatgaaatgattttgatccaatatatgatggtgatgcgctggcggaagctcggtgttctcattgtggtaaaatgtttaaagctacacgtggggtggggttgttactaatagttgctttaggcatttggcaaattgtgagggtgaatataggcttcaccagatttattctaagctgaaatcatgctatgggctagatgctgctgctgtaataaagtggaaatttgatcaacaatggtctcagaaattacttgtggaattaattgtctgctatgagttgtccttcagctacccaagtttagaagttttgcgtcaagcctaaatccgtgaaccacaataaaagcttattgtgttaagaaatataagaaacgaaaggtagccttactaaaggttttgaatggcttaaattcaagagtttctcccacggctgatatatggacatcaaatcaaaagctgggttatttgtgcattacttgtaatttcatagatgaaaagtgaaacttgaataaaaggataattaagttcagtttggttgaggcgccccacgacagcaaaactatgttgagtcaatacttaagggtattaaagattgacatattgaacagaagttgttttctatttcattggataatgtttcggtaaacgatagttttgtgagtagtttgcaacaaaattttgttgagaataatatgctaccatgtaaaggtgatctctttcattttcgctatggtgcacatataatcaatcttatagttcaagatgggcttgatgcattaagtggtggaattgataaaataagcaattattatattttagtggactatagtgaacaatgatcccatacgttgattagaaactaactaagagtaactctcacggaataaatcttaattacttagaatgatattcgattaaagcagagtaattaacagagtaaaagaaataagaagaggattgctgacaactccgaaattcctccgacttcctctactctactctctccctaatctaatatacaacaaagtacaatagcctcttgtaattcaactcatgctttggtgtgtgtgagaatgagggagagaggggtatttataggtggagagatgccttgggaatgtggagatgctaagcatctaaatggaatcttcactctcctcttgacaagtgtcctctttatgacggtttacatcgatagaaacaggcacaaccatcattgggaggtcggtagtaactgccttgccaaagttaggctggattgggccagctaggggttcggctgaaccctaggcggcttccctagcccacatccttcttcaagatgctgacatgtgggccccactttatggtacaccatattttcgttcaaaatgattgcacattttatatgttatagctcaaaaccatgtgggttcatcagtgcaaaatatatttgcattcttcatgctcattctctcccaactttggtggttgattacctgcatacgaatatacaccaacactcatggaaatggttagaaataaatccttccactatgttggatgttttacttttatggttttatacaggtattgacggcgttaatttggtatttaacagccgtcaacaccttgggagttgttctgttttcagcttgcagaatttcgagaccttcttcaccttgggagctgtcattagtgtccatgttctcatgatatttgatgctagaatttatagtgttagccttgactgagattgtcatatgtattttgaacaatttcttagtaggatgggagcatgtcatatgtattttgagttggatgtgaattagtcatttctaatttgcatgtcataatgccatttgatagcacttcagttatccttattctgttaaagtgtaaatttcaaggaactttaatcttctttgctatttcaactttgttgagaattttcattcactaccatgttgcgctagaatggaaaagtatatatgttatgtgtgtgcagtgcaatagtgtgttgtacgtattttatgtctagtgggttggttggcgggtcagcaaaacccaccaaacaaatccattgggtagagcaacaggatgtaggtgacccgccagatttcttgtgggcgatgcggacgtggggcgggctaccgcaacccgccccatttgcagacttacgtcagggttctctctaggaatgacatggttaaggcatcaaatggggtcagtgttcttcctccttgcaatttttatggctctaaataaggaattgaatcgtgattgtgtatcgtactagtatttacaaaccttgtattacgagctccggccaccccctcttccccacctccctcctccgctttgctgccgccagcaaagcaatgcagccgcaaggacggcgccggcggagctcgcctctcgccagcggggccacgctcgggtgacctaggaagccaccgagggcggcggcggtggtgatcgccagatccgctacgctctggccggatctggcggggtggcggctgacggtggggaaggcgacggcgatgaggatggcgagctacgccgagtggtggggaccgatggcggcggggatggcaacagcgggccggatctagccgcgccggaggcggatctgcgcccccccaaaggcagatctggtgtggggcaaactcgcggcgatggcgtcggcgacaacagggtgaactcgcggcgggagagcacgtcgcggcggcaacagcggcacggagctcgtggtgacggtggcgacagcgacgatagcaggtggctggccggcggcaacagcggctggaggagccggtgtggctgccagcggaggcggaggcacgactgcggtgaccggtgaggttcccacgacgtgaggaggcgtggaggctcaacacgactagtggttgtgtatgtcggtgaggcgcgggcagcggcgacggggttggccgtggcgtgaggaggcttgatcggcggtggcactggttcgagaggagtgtgccattgcggtactgtagctgccggcgcagcggcgcagcgaatggtgcgatcaccggtggcatgcggaggctacctggcgggcggcaccgttgtagtggtgcccatgcgctggcagaggttcagaaggcggtggagcatcggtgcatcaatagtggataagcaggcggtggatgggggggtgaaaacccagcccggctgtggccgggctggcaacgatggcgcttgagcgtcattccccctcctgagggtgttgtcgtgccgtctcgccccctctagtagggctgccgggcgaaagcctagtcaaggttcttgagacctcaatggacagcagtggcgattctttcgtcgcttctctccctggtgacgccgtctaggcagcacccttgccggaaccacccaaacttctgctgcaagctttctctagagtcacattctattttatcggcacatggatagagtcctgagaaggcaattgtatctattaattaggatattttatgtaacttccttagagatatgtttgggcaaaagtctaccgcaaagacttatggtatcttagtgtttgttagagatagtggtcgtgtccggtatggacatatcttgtaattctcgggtataaatagaccccgagccctatgtaatttttaacacacacgttcaatacaatttcggcgcatcgccacctttttgctttagttttgtttcgacgagttcttgctttcgggttgagctgcatcggtttcgatcttcaacaagaggtaaaacttgttatgatgacttgtgttctcgagattactgcttccatctttatgacactctaatcttgtctatataattcatcgagttatcatatatcttacataatctttggcaatatcgtcatctaacctacaatcggctaacatctgctaatagaaggcagccgattaggttaaatagcgacgttgtcctagattatataagatatctaccactttatgaaacatccaacggcttgattgtctagatattgttcttcttttcatacttaatgctgcatcagttgagtttgatctattaagtcgtgcttagaatatcgatctctagcctgtcctctggttgccgattagggtagtatcggagtttcagccgatcttatctaatttaaccatattcgatctatatgcttcagtgacatgttaaatccgccctttatgtcaagaaattattgcatttaagtatattaagcttttgtttggtatattatacttgttttgatatctttatatagagtagtatcggagtattagccgatacatgctagatctatctgatcggctatgctataaacatatataatcctgttattaatatatatttcgatctaagtgatttatactgtctcggcatggtgaccgatgaccgatctatcccaatcacttgatttaagtatatattaatataagaactatatgtctttaatatctacagccgatcgaatagatttagttcctcactgtctatttataaccgccgatcgatttatatatgacatcggctcaaagataaatgatatgtcatcggcacctagccgatcggctatcatttatagatttaactacgaattctttgtctctatttcttgttgattacaggatcaaatcaactggcacgctcatacattcgaaggcgagctttggacctgcactggagttaagcagatctcccaggcctcatgttttctgtcaacagaaatgctagaatgacttacattgtgaaacggaggaagttacctacagctggtaaattaaggatgagaaaattcttcttaatgcctctgaatttttcacaatttctttaatcttcctaagtttttgccatcttttttaagaccattatgatgctctttgctactagtatttttctatcagtattatcatattagaagtgataccaatcgttaatttacgagttctaccagcagaaaaaaaaatattgtaatacaagtagttgatgtggttgtgtaaatagctatgatctattggattaggaaaaataaagggtttagattgattctactagtagaaaatattgtaaaacacttttttttaaccctgacttttgtatattgatgccctacccacttattccgctagttgactgtcaactgactaatttttttttccaaaataactatatatactgccccgttttcactgaataataattttcagttattaaagaaaatattagagtggccgaatctcatggtgtagagaagggatagagtgaaaatttagaagcacgttatagggaattttctcactgaattgaacaatgaccggttttcaactatgcacgaatatgatcaagcaagaaaataataataaaaccatcatatatatatacacacacttttgaggcaatgtctaaaaaaaattgatcacaaaaactatttgaacaaagcaggcattcttgtttgaagaaatatactagaggaaaaaatggaaattgtgagatacctacattatatttgaaattactaaaactatattatattgaaatatatgttgctcatatgggtgcacgggtcgacaaccagtagatacaattaggaatgtcaacggggaatgcccccgcatggaaatgtattctcatctacgttctcacaagtcaaaaaaaaaaatccctgtacctattaccggcaaatacaatgggggagaacgttgttcccatccttgccccggggaattaatcgccttagggttcttgtctatgcttaaaacaacatatacataattttctggtaaaatttgctacaagatacttaaaaaaacatttgttgggagcactgtaagaactcgattgaattttcttgggacactcaacaaaatgtggtagtttgctgatagacaccatacgcgttatttaatgatttcctgctatttttggagagagaattttcgtaaaatgatagatttgccccccgggaccaaacttctttcctaaacaagcaagccggtggatggcgctgcgaatagagagcgttgggggtggagcaacctgcggagatggccggtggagaggtcggggtggcgggcgatgaggcgaggcgatcgtccagtaaagggagacagctagcacgggacaggacaccagcggcggagaggcccacgagttgttggcgacgaggcaatgcaaggccggcgtcaagcaaaggtcgcttgcaccccccttcccggccggtagcggcggcttggcacggctgtaagaccaacaaatcaatcagcagagacaacttcgtgtttttaatggcattaaagtgcacagaaagtaaatgaatttgtgatatactaaaaagtttatataaaacaacttataaagtcgattaaacgaggatgtagaatatattttagtccacttataaatatgaaaaattagcttatttagtttgtcttttcaattgagcacatttcaaaagacgtaagtttttggacataaagtaaatggattgttacatccctgacggttataatttgttttagtagcagcactgctactactactacagcgttctgcaatcggaattcagaaataaaacaaattataggtgcagcaatgatgtaaaattggtatacccaccagtgatgtttagagtcctgatctaataccacgaatgaattggatcctttaacaaagtgtacagcaggctgaataaagtttgaatcctgttgaatagggatagtagaaacctgaagaattgccaaaaccaaatctctctctctctctctctctctctctctctctattttttaatgcttaaataatctgagggacaacaggaacggatcaacctgcatcaatagagcgtgaatgaaagaagaaatcaagaccaaaagattgagtgaacaaatatggttcaacaagcgaaccttccgaattgaacgacgctttccggtgatggagacccccagtaggaggtgaattcagtgaggggaaggaaggggctcggctcggctcggctgagcatgatcgatgtggaggcagggcgatggtttcttgaatgccaaccatgaagtctactcggtctggtggcgcgggaagatgcgagagcgggagtacggatgaggtggggaaagcagagcacggtgaatataaacctatacacttcatccccacttagtgtagttaatatcaattttcctgtgctgacattcagctaaatcacttgaaagtgccacagccgtttgatcgaagatcaacaattcacatccacagtccctttctttcattctgctaacccaaaacgcaacttttgcacatggacatgcacgtatgttaagggaggaggggaagtacgcatgccgagataaaggagatttttttagacatatatttgagatcatctcaagatctaaaggttgaaaataacaggtccataaaatcaatttaaggtagaacagatggctagatattttgctttttttcttataatttctaggattttctctaatttattagagtgtcatgtgatggtttacgagcatttgtaggttgccccatgacggtttaaaagtatttctaaaaagattaatggactttattatataatagatttcactaatttattagagagccatgtaacggtttagatgccacatgatgttttaatggatagcaaaatgcccgttcttcgctacgggtaaagataaaaaagataaaattgaattaaaacatatttaggtatttaattaaatgaaatacaaattttctgaaatatttaggtattttttaagtaggtaggtatataactaaattaatttataagtaaagtaagtgtgagaaataaaatgttctggttggaaatatttgggtatttttaagtagttagttatataattaaattaatttataattaaagtaagtgtgagaaataaaatgttatggttggatttaatgtttattaaattttctatattattaattacactcattgaaattttcttggaattttcgtagcttaattgctaattttgataatacaaatatcattttagcatttatttaaataaaaatccttttatctttattggtcttttttagcccactttcttcttcagcccgcaagcgaccaaagtctaatttatatctctatactctttctctcgcttgctgatctgccggcccgcgtgcggcccaagtgcggcccaacactcgatcgatctgcaattccaaattcttgaaaaccctaaccctaaccctccccctccccctccccctccacccagccgagccgcccccaacgccgcctctccccctccccctctccctccggcgccgcttcccctcccccacagccgagccggccgcctcccccgcccccgacgccgcctttcccgctcccctccggcggcaccctcccccctagccgagccggccgcctcccccacccccgacgccgcctctccccctccgcctctccccaccggtgccgcttcccaccgctccctctcccctctccctcccgtctcaccggcacggcgcgggcgacggcggggagcggcggcgacatcatcggggtccgtgctccctcggcgacggccgtccctacggcagcgtcgacggcgacgacggcgtctacggcgtccgcgggtagagccgctgctgccggatccgcccgcggtcgccgccgccgctgggagccgccgcctctcttctccctccggcggcggtggtcggcggtggtggcgtcgccggccgtcgatattttttttccttttttttttgcatttttttctatccctattgctaaccaaatcagattgtgtacgaacgaaaaaggccgaaaattagatgtgacgaccggaaaaatatgaatatttatattagttatagatatagatttttaagtatataatagatgccattaattcatatgataaaaacataacattgtagtacataatcaaatgtcacgagcacaaaaactttaaatttagacccatatatattcgggtctcacaaggaatctctcccctccctgcaaaacccgacaggaacaggattcctcccatcgatcccatgtgggaaatcaattctaaccatccctgttctctaataggagaaagcccaatgaaaaattgggatccaattgacatatctagagacaatcgtcaaaaccaattacaaatgcatcaattgttgatgtgaaattattatcgataacaggacgatgaaactgaattttttttgtgcgtgaacaaacaattcaaatgctctacgagtataaatattagttttttatcccaaaaactaaataaaagacaaacggggagcacattattttgatcacatgcattgataaatggatcaacacaacaaacaacatctatttggtggccacggcgatcttcatgccgttggcgcagtgcccggggaagccgcagatgaagaagaccttgccggcggcgagggtgatcctgtcgttgccggaggcgtacttcttgtcgccggcgccgaccttgcagccgtcgtacccggcatggtccacctgcagcacgttgtgcatcatcgggctgtacttgaacacttctcatcgatcatcacaacgtaattagttaattattactgtggtttaatttgtactgtaaaagttgatacacatattgctactcaccgagcacatcgccgaccttgaaggccttgccgttctcccagccggcgacgccgaaggtccagcccttgtcgtcgccgacgtgccactccgtcgcgccggcgacgaggatcgtctcggcgcagcagacggccagcagaacggcgacgcagacgcttcctgcccgtgccattgttttgtactagtagcggcttaaactgaactgattactcgcaagaactatattggcaatggcaaccggatgagctactgactgatttattttctgaacttgtggttgatgatctgaatgttggctcggcgaggtgcgactgatccctcttaatttataggggcgattcggttttgtaccttggtaattaatgttcggcaaaatgggagttctatatctgaagatttgttcactgaaatatatagaaggcgttaattccaagcatttaatttcatggtatccgtggattaattggatgagataaagacatcccaaatgtaaccttttgcctcaatcttagcatttggacaattcccctggacatcttagcatatcccttcatctcaatcacaaagatattgcctgattggtcagtttcaaaaatagtatgcagatgacaattgagcaaaatggtgttcaataacgagttttcatcaagtaaatttggtgacgagagaaaggaaataaaacagaaattaacattgttgttgcgtatggcaatggcttatagtcgattcttatcacttattaacggaattttttgttgcacgatagtggagaaaacgaaagaatgataatagaaaaaaatagagcactaataattaaaagatcccgttatttctactattatagtactattataggatataatttctactattataggatataataggatataatagtatagtgacatgtattaatacatagagcccatattagattttatttttgtacatactacatacctttaattgagtcgatccgacaataaaccaccaattaaataggagatgatggtcattttacctttccaaaataatattaaagacgttcactttaatacttaataatattttgtttctctttatataaatcgtattttaagttgaaaattgttaaagccatggatgacatcactatgaaagttccaaattattttcgtaactatttatttaaatttaaaaccttgattttttaaatcagtcttagtgattttaatttatataaacagtgataaacattttaaaaatatcaaggtatgttatgatacagctattgattctatcaaacttcagtccaaaatacgactgatacataaaaaagagagaaatatcttagggagtaaggtgaaccgagttcggggtgtaaaacgacgggtaagtgctctgataaattgttgggaagaaaaatgaacttttttttataacaaagaaatggcatagttccttcttctgatttttccgtagcaatggtctggaaaaatgataggctacattagaaccattctgagattctacacaagacctgcagagtttctggtcagaacctggattcagaattttgcaattcaggcaatgaaattaagtagtcctctagtccaatgagaacacacaaatatttgattaatttgaaccttgacaggtggatggattcagaaatttacgtgacagacctgaccagaattgttatgttcggctggtttggttttcacaacttactccatccattttgcaagaacacaacagacagtgaaaaccttcattgcatatataggctgatgatgctgattttatttggcaaatatatgcaggagagcaaaaagcttattacaccatgtaatatatcgaccataaattcacaggcacacatctaagtttcagacagtctacagtacgtgacagctgcaaatacgaaattacagtgtggcaatggcagtaatgcatggcaccttgttttgtcacctcccttattctcatcgttacactgtgtgcagtgcagtgcagctgctaagctagctagctagccagccggcgcgccgctgacgacggcctccttgtaggacccagccggaggcggcgggacctggcccgacaccggagccggggtcctcctctggccttcctcaagaatgaggggcaccttgccctccctctccctgttcagccgctcctgcgcgccgccgcgcagcttctccagtccccgcccgtccatctgctgcatcttgaacaccttgaggaggttcagcagccccgccgcgacgaacagcaggctgccggagacgcagaaccatccccagctcctcccctgcatcccagagcagagtgacaattattactcaagagtaggtacagtagcatatatatccacactgatcggcttcatgcatatgtcgtgttctcattgcaactttcagacattcagaggtttgtgcaaattaccagtagctctgaacgggatgtcgattggctgtggatgtcgtggcggttgatgatgccgccgatcaagaacagcgtgctccctagcagcagcggcgtttggacacatttctggaggatctggacatgcccgttggcgcgttcgtatacctggcagatgttttgtatggatccgagtaaccacagcgccggcccggcgatgagcatgttcaggccgtgcttctctaggctgtgcctgtaccctcttgccatctgtaatggaaaattgagttgtgctagttaagtgacacttgtgccatcattggtcttctgtgttctaagttactgaactcttgacaaaatatgatggtagcaagaatttctgaattgatctttattgttctggactttacactagtaaacttttcaatttaagataagtggaattaactgacactcaaaatcgtaccagcgatactgaattttggaacgtttatgctagctagctggctagttcctgacattttaacggaagtaaataggaattaatttgcatatccatctggtctcactagtcggtactcatttacttatcaaaaagaaaaacaaatcaacacgcggagaaatctttaaaaaaaaaatcctcttttacaaacaggtctataagattcacgacttagttcattttctccaaagttcgtgctgtgacaggagaaatatgtgcgctacttcctccgtttcacaatgtaagtcattctatcatttcttacattcatattgatattaatgaatctaaataaatatatatgtgtagattcattaacatcaatatgaatgtggaaaatgctagaataagttacattgtgaaacggagggagtacttatagttagtatactttgttactgccattttgtttttttaatatttttagtatagattatatttttgaaatgttttcactacaactttgccttatgaaattagaaatgttgtcaccactacgtaataaagcactagactgttatagctagttagcagcactcttaattaaaatcagagagactaattaatacagaccttatgggacaggagaaatttgtattgctgcttctagttagtacactctgtcactactattttgttttttaaatgttttcactacagatttatttttttgagatgttttcaccacaactttgccctttgaaaaccagaaaacgtttatcatcactactgaataaagcactatactattagcaacactcttaaaaataaaaagcagaggggaagtaaagtaattaatcgaaacctgaatctcgaagaagatgagcgcaatgagggtgagcacggtgccagcgaagtggacggcggggacggcgacctcgacgagagcgaactggctgtcgagcccggcggcgagtgcgaggctgtagtcgacgccggcggcgtgcgccaggaggtcgtgcgcgttcaccgcgaggaggaggaggagcccgagcgccgccgcggcgaggccggacctggtggtggcggaccacgcggagaggtgccacccgaagccgccggctaggagcaccgccgcgaagacgtacgccccggcgttgatgtactcccacctcccccgcgccgcccgccccccgccgcccaagccgtacgcccggcactccctcgccgtcgccagcttcaccattgtcgaacaccttgtgtacacacctcgatcgatcgagctcgcgtggcgcgatgggatggaggaggcgagagcggggaagaagaagagcgcggcgcgcgtgctcgccgacgaaacgggtaggttcaggtcggagagcaggggtggccatggcgcgcgacgtggcggcgtgcatgcgtcggcacgtagagaggaggacactgcgactctgcgagactgggtgagctgtgagctcttctggaaagactgtggcgtggcgtggctgggcttcgcgacgccggtcaaaccacgtggcttcgctttcgaatatttcatcggagtcgcaaatttcgaaacgatttgaatttggtgaaataagtctactttacctcgctcaagattaaatcaccgtagcatgaaataagtctactttacctccatcccaaaatgtttgacgccgttaacttttttaaaaatgtttgaccgttcgttttattcaaaaaaatttaagtaattgttaattctttttctatcatttgatttattgttaaatatacttttatgtatacatatagttttacacatatcacaaaagtttttgaataaaataaacggtcaaacatgtttaaaaaagccaacggtgtcaaacatttagggaatgagggagtatataacatcccccatctctaaatattgtacaaataaacttttgtgtggtttttaacgtgatatattgaccgcggttgactagttgagtcagtagatgggacccatatgttgttctgatatcatcttcttcatcacctccccctctcctcctctctctttcccctctctcaccagacggcaacagaaacaaccagcttcgctagggcctagctcgtagccaccaaagggctggcacggaaatacgacaacccgggcgcattggggatgacacagaggtagtggacaacggcgtggtaggcgcagtagacaaaaggtggcagtacgctgggcgaagtcaatatcgatggtggatgtgagtgacggcatggtaggagcgcagatgaaagggaagagaaagggagacagagataagagggaggctgacatgtgagatcacatgggccacacttttttttaattattttttgtgtagctgatatatgggtcccatgatttttattattttttctgataaaattgccacgtaagtaattttatcagactaaccaacaaatagagggacctaaagtgaacttattcctcccgaatgaggcctagaaatactggctcagcccagcaaatgccgtacgtggccgcattgccggcgggcggcggcgcaccaccggcggcggaagtacacgtactacacgccggcgcgccgccgtactgacgacgtacgcgccgcgccgttgccatcgcgtactacactacactacacagtttgtaccgcggaaaagagaagaaaacaaaaaaagccgtagaatttcagccgttcgcttgcgacgtctgatctccttgtccacgtggcggcctccgattcgctgccacctcccagctcaccccccttcctcatctccgccgccccaccaccggcttcccgcgccacaagctttgccgccacctcctcctcgcgacaccgctcgccgtcggtggccgcaccgttatgccatggccgccaccaccaccatcctctcctccgccgcgcccacgccgctgaccgccccgcctcgcgcccgcgcgcgcgctcccgccgcccggaggcggcggctaagagcccgtgacatcctcggcgccgcgctcggcctcgccaatggcggcgccagcgccgcgctcgccgcgccgctgtcctacgaggagacgctgcgtctctcgacggactccggcggcggcggaggcggaggcggaggcggggagttcgcgctcccggacctcggcctcggcggggtgctcgacttcgtggcgcagaacccgctggcggcggcggcgggggtcgccgcggtggcgctgccgctggtgctcgcgcaggtgctgggcggggcgtcgaagccgtacggcgtggtgtcggcggccgccgcgtaccgggcgctggtggaggagcccggcgcgcagctggtggacatcaggccgcccggcgacgcccggcagagcggcgcgcccgacctccgcgaggccaagaagaaggcggccgccgtgccctacgacggggaggacaagaacggattcctcaagaagctgtcgctgaggttcaaggaccccgagaacaccacattggtcatccttgacaagtgggcacctcaaatctttgctgctaattgcaatgtggttatattcttaataatctctcttgttcatcaattctgtatggtccgagttcatttcagggaaaaagaaacaaaaattttcttttatttttgctgcaaatggaacacaatagcaatgttcagagttggctacatttttttctttctgaagaagaagattgaacaatatcacaagaaatctgtgaacaactgtcagacttcaaataattataccatcaagtgtacatgattcaatttgtttattttctcctcctgaacatttatttagcttggatattatgcaaaccaggtttgatgggaactccgagctggttgctgagcttgtaacagcgaatggttacaaagctgcttttgcagtgaaggatggtgcagagggacgccgaggatggctggtatttaactctttgcacagctttgttctcggtttctcgctgtgagctgacatttacattcgctcaacaaaaatgtcaccattggctagtgttcaactgcagagcagtagtcttccctggacagctcccaagaagggattcagcttgagcgatctaatcggggtgagttatcattatcaatatgaccttttgaggatgtgtcaactatgtttgatttaatttctttgtattctaaggtctcgatgcaactctcttgtcgattcgaatttgtatatatgttgtcgaattctgattatgacgtgcaaaaataccaggatggcacagatggtttgcctgtcacacttgggcttgctgcagctactggtttgggaatacttgcctacacagaggttgatcagcttggaagttttttttttttatgttttgtggagttgcttctgtgttcttaccgatcatgtaatatctatgctgtagatagagactgtgcttcagtttttggggtcagctgccattgtccagctagttgcaagcaaactcatatatgctgaggtgcctactcttctgaatgaacttcagagatatgaacaacgttccttttcgatgacaagctcttactgttgtgctgcttacaggaccgaaagagaacccttaaacagatcgatgatttcttcaacaaaaaggttgctccaaaggagcttgttgatgaaataaaggtagccatctatcttactgaatattcagtttcttgtttctcactgactaatatttcttaataggatcaagttcattcctggagagtttaggcatgcatgaacctattgtatttagtttagtagcattcctagcaggtacaccgctaataagtcttgtaagtagaaacatcaagaccaaaaatgtactaaacatcaagttctttgaatttgcatttttgtcaaaccaatcaaaacatagttagaacttcagatttatgtggacctcatgacctctgttgccaactgttcacagtattgtgtgattggtactattagcaagatggataaggtgcaaaatggatgtaacattcaatatatttacctggttttcctgatgggatttgcagtttgcattgccagactctgctgtcccttttttctgaactcagaaaactcacattcttcacatagtaaatactcgttacaaggttttgttctgtaaaatggtaataccctcttgcaatctgcaggaaatcggtcaggctctgctgccttctactggtaccaagagccaaccagcaatcacagaagctgctccagcaacagcagaagctgctccagctgccgccacagctaccgctgcaccaccggcagcaccggtagaagagaccagtacagaggcagctcctgcagagccgacacctctttcaccatatacaaatgtaagtccacacctgatatatactcattgccattcatctctttcacctgataaatcattccttgacatagtgttcatcactctgaatttgcaaattctatgcagtatccggatctcaaaccaccatcctccccttcgccactggcaccggctgaggcgactaaaaatgagtcggaatccgagagcgcagcgaccgaatctgcacctgcagttaactcagcaccagtagcagaagccgccccagaggcggcgccacctgcagctccgagacctctttcgccttacccgaatgtaagctagctacagcttctcaagctccattgccatatgaacataagctgcaatcaatgccattgtcatcaaacctacatttgtgaatttgcaatgcagtatccagacctcaaaccaccatcgtcgccttcaccatcggcaccataggcataagttgctgaagaccgagttcatcgttgatctcgacggcatatctgtacaagatatatattaccaggcctagaggagatggaatcgagctgtttatatgatatcaaaaggaagagtgttttgttgtatcaatatttagtccgatccttatattatctcattggggggcaagttttttttaagtacatctttgggtatggtgtatccagttgatgcgttctgatttttcgttttgtttttcatctttttgcacctgtaaatgtgggatcactagcactaaaaagagttcatgtcctgtactatacttgacatgcttgacgtgtaaatcatcagctcaaatggatgacaaaacatgatctggatagagtccagttgtgaagcaaaagtatgtttttcaaggatttcaaaattttcaatacaaagttgtatcatcttttctggcaatttttttataacgctgacgtgtaccttaacttttcatgctatcgggactctggtgcatctctttcaatgggcctaaacaccagggccacgcagtgatcaacacagcctaattgggcctatacggatgggccacaactctagcccatccaagtgtatgggctagaaaaatacttaaatgacagcccatatattcgatggccatgtttcctgcccatggaccagaaataacaaaattctggcctggacacgatttgtggcccatcgaaatgaggcctaaagcattttgcgttggaagtttttaggtgtccagtcgcattggatttttgaaactaacattagattagtctagccgatctgctaccatgcatgcattatgttcaggtccacagtaattagaattcagagcgtcacaaacaataattaaaaaatgatctacgaaactatacgtgaaacgtagtgaacctgaaaagaaacagtagtatctattacatttatatatattatgataaatgaactctgcatacagctgtctcaattattagaagttaccgagctaatcttatatccttctttctaacaatacggattcatgcatatggccaaaacatttagcacctcgatcagtttcaatcaactgttgcacttgatagcagtagttaatactaattctcttttctattaaaaaaccacacatcttaattatttttagtctttcagtattaatttatctatagtgcacgttgtttctcttctgtcataaggttatacacatcatatcatctcatctagcaattttgcacaccgcctctatattatttttagctttgtgatcattgatatatatatatatattctctcatttctcctttcttctcttatcatctttgatattaatttctagcattatagaatctatataatgtgtaattgtgtaaagcacgtgcagtcaaatcttctggctacaagtcattttctacctcatatttactccctccgtttcataatgtaagtcattctatcattttccacattcatatatattcatctagattcattaacattaatatgaatatggaaaatgctagaaggacttacattgtgaaacggaggaagtacttattattataccacttacctgcaacaggtttatgttacttaatgaaaaaatatactagtatgtcattgatcaaccatgctgatgagtattcccacgttctaataattcaacaaagaaaaaaaatgcaatttagaatgtaaaattaaaacgcgcatagcgtgtgcagagagagagaaggttttttcagataatggaaaaacttacatttccgacctctgcagatgcacaaatcctaattatttatttgaataaaactaaagaatcaaaacactagtgcaaaaaagtcttttgtgccgattgggaaccagtcataggtgtcaaattttccaaccggtacccagcaggcggcactgatcacttcggtcatcggtgctgcctgtagaatcgatatatataataatatatacttgccagttttagccaagaactagcacctttaggggcgaacgagtccaaaaaaaaaaacgctcggctcgactggaatcaaaccgagctgagcaagcactgcagagcggattcacatcactatatccatcaaaagttcactaaatcacaatcattaagagaaagattcaccatccaaacatatttaggaatcaaaatcaaccaaaaacaatttgctaagtcacactcacaatcactaaaaaagtcacagttcccgagcttaattagaccgggaagggcgagcgcgggcaacaatgacaaagacacgacagtgataatgcagccatcagcgatgaggacaacggggatgaggcagatggcttggggagcccgccgcctccccttccgtcagatctggcgaaagggagcgccgccctcctgccggatctggtggaggggagggcgccgctgttgtcgcgtgctgtcgcgccgccgtcgccatcaccaagatccccgggctaggagagaggaggcacggaggaggcaggtggggggagacggcagtgggggcgggtgtagggacggcggtgtggaggaggggagaggagggaggaggaggaggagacggttgtgaggccccttcatatttagtgctctctctgttttttaaacagttatgtaatttctcaaatagaatgagtggtcaaatatatatgtctaaatactacatcaacaatatcgtatatattaaaaaaatagagggagtactgcagtaaggatatggtgtggtcgggacctgtatatacgtaaaactcgtgatgatcagtcgaatccatgtctaatccattgcgtgattaatatttcgatcccactttcgcagatagttgctgggatcggcaaaatccctacacaaaaatactactaaaactgattgatctcgcacacgcgaatggagttattaaattatacatcatgcacataaacacttaatgcaagaaattaagcagatcaagatatatatataacaaatcgttcgtgtctagctacagagacagaaacagatcatccatgcatatgcatggtcccgctagtagatagctatctctcgatctctagctagtaggtaggtcgttaacctctcgatcagcatgcatggatgcagcttgcattgcatatatatagctccaatgcattgctgcaactctgcaactccaagctatctaatctactagctagcccttctctctctctctctctctctctctcacacacagtacgtactctctcaatcgatcgctggatagagatagctagctagattggcccatgaaattaaagtgcaaactaattaagccaaacgcaattagctactagctagctaagctagcacgtacgttacgcacgcgtgtacatgcacgtatagttatgcacgcggctacgtactccagctagcttagctagctagccagtcactgcactgacactgtatgttacacgtcacaagaaagtttgctgaatttcttgcaccagctcctctgcactcagctcgcactcgatcccaatctgtatgaacaaacacaaaccaaatcaacgaatccattgtcagttcactagccagcttaattaacactgcatccaaatatatgtatattaatatacaagcaaattaaattctactgtgtcgatctgtgtgcttgattaccatgcatacacatatcatatagtaaaacagaattaacagctagctagctaaacaagcattatatcgtcgatatatatatatatatatatatatatatatatatatatatatgtgtgtgtgtgtgtgtgtgtgtgtgtgtgtgtgtgtgtgtgtgtgtgtgtgtgtgtgtgtgcatgcaacttgcaagcaggtttaggccctctttatttaggctttggcttattggcttagatttttaagtctgcttatttaatgtcctaagtttagtggtggagtcatacatctatctcatataaaccaaaaaatcttctccaacctagcttttgacttaatagtgtaagagtggctgatggcttcaaaaaagccaaacgaaaaagctgcttatttgtttaggcttagactttttggcttataagttggcttataatcctaaacaaagaggaccttaatcactcaacgttctacagctaccaaagctgtagcttttactattgtgtacacgcatattcttcccagctcgtgctttgctcgactgctcatgcatagtttcgcaccagtagtgacatttatccccgaatatatatttatgtgttcatattaattacttatacccgctctggctctggcagtttctcgagctctttcaaagataatgtatatatacacagaagtgccatttccaataaatactcatgcatcaggcctgtgttataaatccctgtatgtacgtacacactcactgtgtatctgagctctacattagaaatgtctgaacacaaacttagcctatacagcatgcagatacgtatgcctgcatttatgaaacccatcgaataatggaagaagttttaaacatgcagagacaaccgtagagatttatatatatctatgagagggaattatgggccaaagaaggagaatccatgcaggacatgaacagttgaaggttgatttggggcttaattaatgcaatcctgcgtatacgcatgcttagtttcagtttcagtgtgtggctctgtagcactgtagtactcttggtcacatgaaatgaacacatcctaccaattactgttcaaataaatcgatcgatatcatatcactgatcagtgcacttgcttaatgtgtacattgattatatattaaactcgtgtgcgtgcatgtctcgtgtaatataatatcgcatgtgttttgagtgtttttcgagatcgatttagtgtagcatgttatggacgatgcagagattgatctccatgaatctgatgagtaataaaatatacagtagattagtattttaccttgatggtgaaggagaggacggtggcgtcgtcgacggtgcagatgctgacgtgcaggatctcgagcgagaggctctccagagcggcgatgatcttgagcgcctgacccggcgcgcggtgcgacaccgtcttcagcaccaggttcggcccggcgaactccaccctcacgtcggggacgccgacgatgccggcgatggcggcggcggaggaggggatgaccagcggcctgcagctggcgccgccgcgggcggcgagctcggtgacgaggctgtcgaggatgggcaggaacgccggcgccggcgagagctcgtgcgtcgtcgtcgtcgtcgtcgacgaggacgacgtgggcgtcatggccggcgacatgctgtacgccaccgagcacgacgacgtcgcggccgccgggtgcggcgggcgagcggtggcggcggcggcggcatgcttgttgtacgggctgcccggggtgggcgtccgtgggctgatcggcaccccggcggcggcggcggcggcgaaccgcgggctgatcggcggcgtgggcttgaccatgagcgccgccgccgccggcgacggccgcgggctgagcacctggtcggcataggccttccgattcttcttggcctccagcgagcgaagcacttgctgaagctccttgatgtaatccaccacccctcctatgattgacgcctgatctccctgcacccacaattaataatacacacaaatcagatttaaattaattgcactgatctattcaagtgattaatctccattaatttgttcaaccaatgattcactgtactatacattctctgagataattgatgcaagccactgtgtcttcatctctctctctctctcgtatggattggtagctgtgtgtactagatagattctctaatgatgcaagagtagttgtactactaattattggtaggctggtggtagctagctaagctagggcagttcaagcatgcagcaccagcagcatcaacggttgattgctggtcctgtaccatgtacatgggacacaatcatgcaactgttgcagcagcacgtacacgatcagggaaaaaaaagttactctagatgctacagctatagatacatagtatcaaaatcccatgagccattctagcttcattagctagtagtgcaacacacacagtgacactaaactatgcttagtgcgagctaagctaagctagtaattagaatgaatggattaattaccctcttgacgtagaagcatggcatgagcgagcgcaggacggcgaggtgctcgttcatctgcttcctccggttgcgctccaccgtgatgtgcgacatcttcgccgcaccatcgccgtcccccaccgccgccgccaacgccgccggagacgacgacgacgacgacgaccccttttgcttcttctgtgccggaggaccaccgccaccgccgccgcctttctcctcgtcgcggccctcccgccgccgaccgttcgcggcggtcgtcgtcgtcgtcgtccttgcaccaccgccggcgccggtgctggccgcagcggctccctgatcagccacaccagctaaagaaaccccaccgcctccgccgccggcgccgccattgatgcactcctcccacgtctcgaggatgcggaacaggtcggcgtccgcgacgtggcggatgtcgcggtggtcgtcggagaagagctcgcacaggccgccgccgccgccgtccgccatcgattgatctccgcaaacaacctaagctaagctaacctagctagacacagcttcaattctttctttcttcttctcttgtggtgtctaaatatgggtaggttgggatcgcagaggagggaggaagagaggggaatgtttgcgaaaatgaggaatctagagagagagagagagtagaccgttgtccatgtgtagcacagtggccatgtttgggggacgcaagtacaataaatgtggagggaaaagacggctcgaggtgtgtttgagatatcatgcttgatggatgatgatcatcgatccatggccatgcatgcatgcatgctagctagctatagtatagctgcagcttcaatcgattgatgggccctagatgtctcaactgtttgcttgtggatacattgacatctatccactgtgccaactcgatcagagggagccatcgcattagtttttgttttgcaacgaatataacattacgggtttgtttgtataatgggttaggagaggtgggactgggaaatggaaatgaatggagggataggatgaaatggaatgagaagaatggatggctaggattgaaatttaccctttgaggggtgggaaatcatatcccaaacccattatccaaacatggcctatcttctttccagaccaaaatatcaataacttttgcataatcggagggagtaattgtaatgccccaggtagccacgtacctggagtgccacactaaaatacactcaaaaccactaactcccaaaaatattagaaattttggcagagtctcccatataaatacggacatccacgacaggcaattataagttaaactaataacaatatcattcccacaatacgatccatccttataatccatggggaagaaactattagaaatctaaaagattattacaagaccaaaccaggatataatttaagtgtcattatggacctaagcaatatagtttgatagtgtgcaagtaatgtgtatataagggtgctacttcccgctcgtgcatgtcggtctcaatgcgtacctaaaaccaaataaaatacaagagtgagtataaaaatactcagcaagtacaatatggaactagaaaacacatatacacaacattggcaataaagcatgaacagaaggctttctttctttgataggaaacgcattttcaaacaccaaatcaaagaagatagtagttcccatcccgggcaggtatgaattgaaatagtagtttccatcccggacaatagtgaatacatcctagcatttgccggcaaagccaagtaagcgtgatcagtgcttacccacaggaacttgaataaagaaccaaattgcactcctatgactacgcatggtacttgaataattgaaaccagaattaaagaaccaaattgaaacacatccatggcaagcagagaacttgacttatttaagcagaaccagaatccagaatattaaaacaagaataacatcgtacacaaaagatcaacttgaaatctaaatggcgtgaacaataatatgaacataagcagttacttatcacgttgaaatatatcagaaataaatagatagagtaaacaatcgatgaatcacacaattagttcgtcatgcacttacctccaacgaaggattggtatcatgtacgatctgatggaccaccacctaatcacaaacaaaacattagcaaacacattcaaacatgcgtataaaacaatgaaaaaggtaaacctactgccccatcctatcaaaactcaataacaaggaacgtcgcttggactatacacaagactgttgcttcaaacctttatatcttgaaatatgaaaaggctatgactgaaaatgtatacattttgaaaatctacaaaaaaatacctacaactttcatgtagaaaacatatttttattctgccatttaaatggtctaatttgcgcttgaatgcaggctttagaatctgtccagaatttcagactgtctacactaaaacaaccttaactggagttctactcgcccaatcagggtgtactttaccaataaggtaagctaagaaaaacctctacaatgttttctataggcggcctggctgattatactgtttaacccattcaaaaacagttcagtctactactatccagattatgacaaaaaaacaacaatcatactaaaaaaattatatctcctaaaccacttaagataaaatcgtgccctttagtcagaagatatatccaaacattatctacaacttcctagttatacacttttgcagaaaataacatttagagccccgaaatatcgaaaaactgaagcactgcaaatctgcccacatgcagaactgcaacaaaccgaaccgcaactacccaaactccttctctagccttcactaaccacgaattaatgcactaaagccatactagaataactaatacaacaaggggataagcctcacctacggtttttttagagaacttgtgaggagacaataggggagactccggtctaacccctccttctactcctctcctcctcctcgttccgtttttctacttcgcttcttgatccaagctatgaaggtggagatctagggagagcaatttgctgtagatgggagagatgcgaacacaggaggaggggaggaaggaggcgccggccagggagaggggtggcggcactatgaggggaagtgggattcggttcccctctatctaggttttaggggagaactaatgggctgggtttatgggccttctcatgttggcccacttctaaagatattttttcttttatttatttctgttaacatctttattttaacaagtcaacccaaacttaaaaatactaaatatcttttaatatacagggtattacagtaatgtctaacactagcgtctctagcgagattcatttgtattaaacctttcagtcagtttccactccatgcatttccttaattttctatcactggtgataaccttattacatcaggtaattaaccctagctagctagctactccttctctctttccgttttaaaatataataaacataggatcaaattagatatcatctagtacattaattattacgaatctagatatagcgttactgaaattcataatattattagatggtgtctaatctaattctgccttactgtattctgagacacggggagcaaataactgagatgttggtttggcagttgatggatccttccaacacatgtagcgtcaagtcgtcacgccgatcgagggctccacaccccccgcctgccccgccgacgtcggtcgtatcgtacacccaccacatggccgcgcgcgcacaatgcatggcactgcagctacctacctgcatgctacgccgtgcgtacgccggctggaggctggccggccgggccggcgaccgcgcgtacgtcgtcgttcatcccgaaataccaacagcagcagcaccagcatctactccagcatactccctccatcaaaaaaaaaaagacaaatcctagtttccccgtccaacgtttgaccgtccgtcttatttgaaaaaattataaaaaaattaaaaagacaagtcacgcataaaatattaattatgttttatcatctaacaacaatgaaaatacgaattataaaaaaattttatataagacaaacagtcaaagttagacacgtaaacccagggtttatctttttttaagaacggagggagtactatctatcacaaaacacgaggaatttgctagcttagctgcactgcacgcctctctctctctccctctccctcctctctgtgcatgcaggcgtggtacgatcgatccagcacagcgcgcgcgccaagctttttctttctttttttttctttttgcgattttattttttctttttcgattttctcctatttctagcgttttcttttcgcgttttttctgactattttttaaatcttcaaagcatgtgttttcaattttttgagttcaaagtttttaaattttaatttgaaaacttttaaataaagatttgaaaattcaaatcttgacttgaaagtttttcaatccgaatcgaaagttttcaaacttgggttgaaagtttcaaatttcgagttgaaatttttcaaaatttgacttcacgtatagatttcgtatcaatctattagtaaaaaaaccttccaaaaaaaggaaaatattgctaattaccataattagcactaactatcatcattaccgctaattacggtgctaacagcgcaaggtgttgaggggggcgtggcagcgcgctacttccgtagccagcgcgcgcgaaataggaatcccccacaacaaggagcatcgatcgagtagtaaaaagagaactcaatttagaagtagatgtgatccttggtaatacaatgaatctccattcttaggttgagttactttttttttggacggaggaagtatatatatgtgcgtatgaatgcaatccgttctaaaatatactccctctgtccaataatatatatacttcctccatttcacaatgtaagtcattctagtatttcccacattcatatttatgttaatgaatctagacatatatatctatccaaattcattaacatctattattatgtactaaaagtccattaaacttcatacaaacgctttaaagccgccacgtggcactcctacaaacactcctaagtcgccacatggcactatctaatcttaccgttgattttcacttaaattggtggacccgttattttacaccattagattagatctattattaaaaaaataataacttccacatgtttataacatacaaacgctagctgctactgtccgtatgtatgagattgtacgatacaaacgttactgatgttctttccgtaacatacaaacgtacatgattgaaaataaaatgatcaagctttcttaaccttcgctggaagaaaaaaaaaccatacacttgtacataaaaaagtcacaaacaacatacatccataaaaatcaaccgtttttaaaatatgattttctacaatataaagataaaatatattacttcacatgtataaatatatttagttaaattaagatctataataaatatccaatcaatgttctttaaaccatcttctaaatctatctattatatactaaaattacattaaactttgtacaaactcttttactctgctacgtggctctcaaataaattagagaaatcctagaaatctattatatacttaaaagtctattaaacgtactgcaaatgcttctacattgtcacgtggcgctttaataaaattacagaaatcctagaaattcagaataaaaaaagaaaagcatccaaccttcagttttcactcaaattagtggacccgttattttaaacaatggattagagctcttaaaaataccatgatgctaatctctatcccggaaaaaacataatgcgcttacgtcatacgatcgtctccctcccggaaaaaaaacaaaacttaaatacctacatcatatactataaaaaaaaaataaagccaaaaaagaacaagaaaacatgcataggtacatagtaaaatcggaaatatatactaataaggaaaaatcatcagtgtcggcactgatttgttgtcaacagcctttaatctacgattttattaaaaataatactacacatatatgcacaattaaacttaatataaacttattatagtgataaatatatcatgaaaaatgacgctaacatgtaatagttaatacgataataatgtttcaaataatttcatatcatattttacagtgtcaaatatcacttgacaaaaatatacaacgttaattttaatctacatgtgtaaaaattaaaaaaacaaaacctatcattgttttttaagtacatctgtttaggtttatttaattttaggagagattgagattctcaaagtatttggaagttttcaaaaattttcttacttgaggtgtgagaagcacaaataatagatagatgagaaaaattaaattaaattttagccagtgataataaaaaaaatataatttagctttggtttttaagtagacctttttaggtttattttgggtgagattgagattctaaaagtatctgaaagtttttcaaacctttttgattgctatttgaggagtgagaagcatacaagatggatagatatgaaaaaataaataaataagattttagacagttattttgctacaatacaacccgtaattcatcacgagaattatgtatgttctttgccaaatagtattggaaaaaatgaataatccaataaaacatgcataaaactacttatattatattttttaattgatagaaattctaatatagcgggtataattgatggatgaatgtcatacaccactgaaactcagcaataagtgcactctagcgaattagatagtgtaaataagtttgtgaaaataagtacattattacaattagtaaatgagtctcatttagttataaacaatatatgttaaaaaaaatctagcactaaaggatgaatctttatcaaaatataaataatgatatggtgttttgtagattttcatggtggtacgtctctttagctatagcttttttttctaagtagtgccgaatgattaaccccactcatttgaaaaacataatactgtttgtattgcattaaaatttgagaagcacttattactaacttcatatacacattgtctattctctaccacaaatcgactcgaaactttaaaaaaaaattgtttcaatcacctccttcttctttctgtccctttttgtcctttaatgcaaagtgcagtacttgctatgctatcgtaaatattgtatgggcatgcacattgttgagttaaggtcaccatagacaatgtaactaaagtgatagacttatcaatataatcatttgtgagtgtaccaatagtaaactaagtgttaaaatagtactctatgatgtttttttagggcatggctacatcgatgcggaacctatatgtttcaaggcattacatatgaaagccttggttggcagatacatttgacttcatccgttagagaggtattcatgtttatttttaaagatgttatcgtattattcggtagatatgttatatttagactatttatacatagatgtgaaaataagtgatgaatttttataatgtaacaataatgtatcatttattttagtggtactaatatagtttcatttattaaaagtgcacctaactcttaaaacaatgatagtaagtaatgatgagaaacaaccagtttatatatgaccaggacaaaggaatttttatttaaattcgagggacattcttatcacattagtagtatattaaaatctatcgtctattttatggtaaatatattatggaaatgttctccaatttatattacgtcgttatagtgtttgaacacaacctatgatacatgcccgcgcgaatacgcgggctacctttctagttaatataaatgtgaaaaatattagaatgacttatattgtgaaacggagggagtaacaacctagaaataaaatgagacatttcatatatccagatttgtttgaactattattacatgtcgtacattattttcggttgttatattttaaaacagaggttatctttcgcatgttcgttatcgcgtactgatcgacttcgttctagcatgcagacacctaggggtatagctaggagtacggatttcctacatacctttcgcatcgtatcgtcgtctcgttacatgtggaacacattgatccgccagttgacctcgctctagctagctgcgctgctagagtagtactagtccattgtgtattctcaagtatacgtacgcgtatagtctacaccaccaccgtacagcgtatgtatacatacgcgtacgtggaggggataattaattaatatattcaagttcagagttcattcacacactgatcgaccaggctagcttgtgcatgctctgaattaactactacgactattttctttgagagatacagcaacaggttcggcaatatatgtggaaattgctccatttccaccaagcgacctacacctgtcttaatttgaaaatgaatttcattagccgcttgtataaattatttttttctacaagtaggctcggtatatttttctcacttttcatatgtcctgcatgtatgcagcatgttaactttgttactgatcgatgcatcagatcaggtacaaattacactatgacgtattactacatgtatccaaaaggcacagggagcggcttaattaacttaccaacaaaacaggggcgcccctggccggcctgctgcctgcaaatcgacagccttaacttacactgatcacaactactcctatagtcacacctcatgcattaagctatagcgtcgtcgtctcacattataattaaggtagtagtagtacatatatctatctttttttttagaaacttagtactacaaatctaccaaactttaattttaacggtccatgcatgcatgcatatgcaataatacattttccgaccaatgcaatttaaactttctgctctcatcagccggtctcatcagatctgatggccggccggtcgatttgcatgcatatgtatgctatcgctgtcctctctctgccatcctcttatgctgcgtagtgtacgtattacgtacgtatagctagtacgtgatagcgatattagttaatggacatgtacgtgccatgcatgcagtagtactgtactggccgcccgcataccacggtatacgcatgattacttaattattgattgcctcacattatttcctttctgcaattttttttgtctagttttttcagttccaacaaatctatctatctatcttctatctatctattatatactaaaagtccattaaatttcctataaacactctcaagctgacatgtgacatcctcaaaacgatctcaagctgccacatggcacaacaagatatatatagggacccacatttgcagccccactcaatgtatcgtgtatctgtgtgtatagaaagcgagggcccacatgtgcattcccgcacgatgcatccatcttatgtagattagtttgatgcttcttccatataagataccaaatctatctctaagcaaaggcaagccagattagttactcctacgggactagcaaattatatctcctatatacaggacgctgtcaataaattatatatcctacgtagctcaaagataaaatttgaatttacaattaaaattcatattctttcatcaatggacaaattcaaaatatttcaaatcctaacgccacaaaaattttgacaatttatataaggtgccaattgttttaaaaagtcaaatagattcatttgtcaagtttgtaataattaaaatcaaataatcatatcctaattgttttttacgcaccctaattttatcttcatatctatctataacatattaaaagtttattaaactttttataaacgctcctaagccgtcatgtgacaccctaaaaatactcccaagccaccacatggtattttaataaaatagagaaaactgaccatccatttttatttttatttaaatcagtggaccgattattttagaatgttagatgtatcttaaaaaccaaaacctctcaacgccgcgcctccgtgcagcacacaagtattgctttctttttttttcatcgtaatcacaattaaaattaaaattatctttatggaaaaaaaaaagacccacaaaaatacatcatatgtccactaaacatactataaatctctctaacagttgtgtggcacttttaaattatagaaacattcaactattcgttttcacttaaatcgatggacacattattttacgttgttattagattttttttaaaaaaaatcccaaacaattaggacattaaagtacgtaaatgctttagtaagctgctactaatctcgcttaaattacagaaagtcctaataaatctgagaaaaaaaaaacatccggccatcggttttgacttaaacatcaacacattatttcatatcattaaataaatatttttttaaagaaaagaaacatcccaaccctccctccatccctattcctgcggcattacttttctctatttattccatctctataacaattaaaattaaaattatctttatgggcaaagaaaagaccacaatttaacctccatatattaggtccagccagctatccctatgccccttatgatctgtttgaattaccatattatttatgtgaaatcaataatttaatacccatatggactatattttgctaacaaaaatttacattctagacccacatccatattgaggcctccactaaataaaagaaaattctaaaatttctcactaaaaatcaaaatatcccaccttaatttttcataaaactggtagacccattacttatattccattagacatctaatgactttctatctacttaattatatttttccctcagcatgtatataagagctatttacccatacattcctatattgatcttttatcaataaatgatctttttaagagataaataaataatcttaagatgatcatagcatctaaattatatatgtgatatatgaagtcgcgtaaccagttgaatatcatattgatcgtacagagcacgttggttgcactaaggaatcttaacattgaaataaccatgacgtcgccttagcaatatataagctaattccatataggaataagaaaaatgtccatttaaacttgatacggtacatcatgaattcctgacatttagcatagaacattctagaagcgtgtatttttatatgacactccagtttagtggtaatttgctaaaaaaactatgacctttatttaaaattttcttacttaattggagagagataatttagaatggatacctttaccccatgccgggttataggatcaacccacatattttcatcccgaattacagggatcaaagcatttcaaggatgtttcatagaatggaattctcccaaaaaaaagagatgaaaggaaatgaaaattgaaccaaaaattattaattctaaatagaaacatttaaacattttagcaagactaataaaatcagtatatctaaaaaaattaaacattcgaaaaactaaatcagcattaaacaaggtgcccgtgcatgtgcacgggctaccttcctagttaaataaataaccacaaattttagttacttttggatggctcagatcgcatcaagattcactacaccggacaaggctacctgtgacgggctcaaactgtcacctctgacggatttagccctggtcagagataagtggtcactgatgactgtcctcacctttgatgggtgaaggtccgttagtggtgaccaacacctgtgacggaccatatataaaacccgtcacaggtgactattatctcaaacgacctattagtttgtgacccgtcagtgatgtctttaacccaacaaaaaaaaattgaaagacatagcgtgcaacccgtcactggtgtgaaagacctagcaacaaaaaaaatggcgcacgctgccatggtggtgctcgttgacacaattgctttgctcacacaagaaattcaaaccgatagatctcatatagcacacattcatagatgtcatatagcacacattcaaagaaaggggatggcaagaatttctcaatccacatacaacaatataatatcaatgcaaaacgagaggatggcggccatggcgagggatgatcgggaggtggaggcggcagcgccctctggtgggaggcgcatccggccgccggagtgaaggggaagcagagccggcgtccgatggtcgggaggcggccgcgtccggcggctgggacgcggatccacgtcccccaaccttgtggaggcgagatccggtgggagaggcactggcggccggatccggcttcccggaggccagatccggcgtccgacggtcaagaggcggccgcgtctggtggctgggacgcggatccacgtcccttgatctcgtggaggccggatccggtaggggaggcgggggaggagtctggcagtcggtgtgggaggcgctggcggccgggaggcgggcgggacacggatccacattccccgacctcgtggaggctggatccggtgggggaggcaggggaggagtctggcagtcgatgggggaggcgttggcggccggatccggcgtccgatggccgaggggccggcgaggcgtgggaggtggaggcaggcggcggtcgggaggtggaggcggctggcggcgggacgtgggaggtcaggaggaataagagagaggtggaggcgggaggtcgggaggaagtgagggagagagttgaggaagaggagagagtggtggggagaaggaagagagaagaggagataaggccgggaggtgggtgggtggtgggccccctgggtgggtggtaggggtttcttttttttaagtcatcagtgacgggtaaaaaaatccaacacgtttgaggtgaggtatctcacctgtgacgggttacaaacttaaaacccgtcacaggtaagaggtcatcagtgacggatctatatgtagacacgttaaagatgttgtgtgtcgagttccttatatagatccgtcacagatgagtacttacctgtgacgggttattttcttgagccctatctatgacgtgatttattgtaacccgtcacagatgaggttatctctgacgaggcactttggtctgtcactaataggccgtcacagatgggccgatttggcgtagtgattcgggcaaaaactaatcctctcccttcgccctcgcccttcctggtccattccaccgctgctagctagctagatccccgatcgactatgtctcactctccctgtgcatatccctctactttgcaatcgttgcaccggcgaggcccagtaccacctccttcatgtctggtggctcgtgctgccggatctgcattgctacctaaccacacagtatattccccccccccccactgttgactctgccccaccatccatcctagtggccggctccgatgccactgtcactttttgcgccaccacggtatccctctaaagccgtcctcaccgctcctctatacctcccctcccctccaacctctcaagatcttaatgcatagattctttattagggttgggtatcgctgtcaccatgtccggtgagtcgccgtcttccttcctctcctctcttcctgcatatatcagtcaagattgaggttgaatattgcgtaagtaaaattgtgaggaattccagtgagcataagcctagcaatccccttctattattactgcacgttgtttcggatatcaactcaacttctatcgtgttattttagtatatatgtttaataacactaccttcatccagaatatgtcccggtgcatatatagcctggatccatgatatttgtgaacggaggtagtctattttaataatataaataaatgaataaaatattatttataatataaatatcatttgtcgcatctgaaatatatcttgatagtttaattttgtataagctagtgatttaagattttgaaaatgacttcatacaatgtaaacaatcatctagctagtcctatttgaaaatttttgtttggaaaaaaaataaaattactcctgtttgaaaacagatgaaggacggcatgtagtagttacactgcacccacagtatagcagtatatatacgtgtacccaacggcctgcatgcacacacacatatatggataccccagctttttgcagagaaataagtatagagccacacccaaattcaaatcatatattgctatagtagctagctgcagcacatattgccatggcatttatgttcaagtattgtatctacatttgcatgctagctagtgacaccccttattagatacgatgcagatgcagttaatctgagtgtgtacgtagcatgtactgtatgtactggaaggctgcatctggaagaagacacggcctgcagcaggcaaaagtttgaagctttttaggggtgtaatcgatcgtaggagagggatcatgcaagatcagaatgctatttatgtgaatctagattatttagcgtggtcactcatgtgtgcacagtttatttttttttatatgtatatgacccatatctatatctaagcttccatatagtactgtttcacttagtagctggctagctagacataccaccgtatagaatgcatttaacttccttaaaaaaagtatgtttagatgaatatatataagtatggaactttcgatctgaaatatagtcttgtgtagactgcagctagcaagcatgcagcacatgattagaagaactaggatctgctaagttagtactatactgtatttgtataggcagattgaagtttctgctagctataaattaaatccaaattgaagggcacgtacggccagagcttgcacgcatggttgatgaaaaatctgaactctgaagtaaataaagagaaaaaggaagggagaagaatgtaccataacactgtatactccctgatgcatgtttttttttaaaaaaaaattatacacagatgcccattgcgtgaaaaaactttttttagtaaaaatatcttgtataatatatgatccagataattgtagctgatatatctccgtagtaacatcagatcaagcgtaccattagagaacaagcaatctgcagagagggtacgtattaggttcttgaaccatcatgcaacataaggcgcgtgtgattgcgatgattaaagaaaaaaactaagttcacatatttcagttctgtggcttactttggaactactagaaaattagtttcaaatataatcaattaatatagtgccggtatacatgaaataaatttaaaagatggaggagaggtacttataaattaaatatcactactgtcacaataaatgggaataattaaactgcagggcacgccggccgctgcaaggaatacttggattcatgccctccaaatcgtccacgtacacttcttgtaacattatggctgctaatattccagctatatagtgtacggtaagtttagttcttaatttaaaattatttttaaggtcatgaattaattaaagtggaattggtctagcttgtaagtgtcagtgtacttgatcgatcgcatgtgatcatgaacattctattgccctgccacaaaaggctgctaagagtcaagtcgttagcttgcataaatatgtaaaacgacgcctatattatcgcctttctttctaacattctatttgcccatggataaagctgctggctaatgcaataaactgctattggctaacaagatgagtccaagaagtaaaacacagatccatgaaaaagggaagaataaatggacaaagtgtaagcctatctcctttccacatgtgtgtctctttgtgtgtgtctcttgtagtcattaagcatgccatgtgtggttataaagtgtttatccagcttcacttatatgtcttcatgtgtatgtctcttgtaaacaagtgggtgtacgtaaagtgcttgtctaaattgctgtgtgtcttgttgtgtatgtctcatatcagttagttcttttggaccactatatgcattgaagctgctaatcagtgcaataatttgggtgtacaatggcgtgatatgttaaggagaggatcctgcccagagctgaatgagaattgaatttgcagctaattgaaagttgcctagattagaattcacctgaacttaattatctcattccttaatgtatttatgtgatatattaactacaaacttgacaaaaggaagcgacaagagagaaacaaaccaaaggggcttaaataggtaaaggaggcgtccatgcaatcccttgtttaattttgaatgcattgatcagagtagtgtgcgcgtatattctgatactctctctatataaactccatccattttttaatctatgacacagttgattttttagatacgttgtttcaccattcgtcttattaaaaaattatgtaattattatttattttattgtgacttaatttatcatcaaatgttctgataagcatgatttaaatatttttatatttgcacaaaaattgagaataagacgaatgatcaaacgttgataaaaaaattaatgatgtcatacattaaaaaacaaacgagaggtacttaggatttatctaggtaggaggatcagtttcaaaatctcaagcatatatgcatcgtacacactacacagtgtttttgtacggtatgatagggtaaaagtattgcattgactaagaagttagggagagcagggagacaatgcatgacaggttggcctggtgataaatagtagtgggtttactaaataatgttgatgttggtatttgagtgtagtatacatatataacgtatacgtataggagtattggttatatctagttttggtgctaattaattaaatgtggaacacttgccgatacaataattaataccccctccgtaaaaaaaaagacaaataatgaggtttgttttttttgacggagggagttatttagaagagagagacaataaaaaaatcaaaataaaattgacaaaccgccgttggttaattcttcgaggtatatattgtgaaattagaatatatatacatgtgttgttatatattgaccaaattttaaataattaattgtaattacagaggaaattaattaaacgtctagaaaaagctcattcaaaatggtaggaaaaaaaaacaactagtgtacctatttgaatatgcgtttatggaacacagtcgatcgtcggcgtgtaccgcggagtaatggtgtatatgcgcgtgtatataattattaactgcatatataattaaagaaaattaaaggggaataatgcatggcagataggtagccataagcaatatgtcagtacgtatacatgccatctcggacgcaaacaaacgcatgcggacaagctgtgtggcacagaaatgcatgtgcaaataatatatgcatgcatgcacatactgacggaaacgcacaggatgccggctgcatgctgatggatgcataatgttcatagctttgatcatcagctgatcttggccggccggccggctctcatcaccattgcatgcattgtacagatatgagatatattgcacctacacacagcaaagtactactaaatggttagtacattcagatatgtgtactcatgtacagtatacatatatagatgtcacatgcatacatacatatatctcatgttctttattttgttctttcatatttggtcacctgaaatgattcaaaggtacgcaatcatgcatgtatactattctaacttgagaagtaggaaaagaagttataatgtttttgatggcttagttgtctgatagttttgccacttgctcattagctcactctgtcccccttctatggccagagagtaggaggagtttgtagagtatctctcttttctacaagctgaagagcaagctagctagctttgatttattgatgagaggagggattgaatgatacaagacacggagaagtcatggcatagttaagtaacacataaataagccgctgcaggccctattaagaggatcatgcatatagtagcatcagccatgcaatgctttctcatcccctgctattggggcatttacttcttcttcccccccaatttaatcccattcaaccacctactatacacctctctctctctctcttcctatctctattccagcagagctctcctagcagctgcctgccttcctgcctgaccctcttgaagaaactgtagttgcagtggtaacatataccctaggctagctccagccccatgaatacatgtagtatgccactgttggtgtagtagtaggtgtggtaccaagccatgcagagtcactagcttcaatagctccgttgcaccattctcactctgttctaaaatataattatttctagattatttagcaaaaattttaaagataaaaggaaaaaaattccttttcagtctcacttgatcagtcgtgtttttcaattacttggattgcccgcctaaaacctgatcggctaaaaatgcacagattcctccatatttaaattagtgttatgcaaatgcttatattatatacaaaatttgaatccaaaaaatatttatactacatccattgtaaaatatagcaatataataccatatgagacttttcttagtactaaaaatctgtaatggggatatgtatgttcagatccgtattgctagaatatgttctattcaatactagcttgttatattttagaacgggggtagtatttgatcagaacggatggagtgtacgtagtatagtatgtatatgatagtatgaggcaggcaggcattgtgattgcatgtacgtacgtaactacgtagagggagggcagagtcgcagagagacagaggcagaggccatagcagaggaggcaggagcagagagagagagagattctgacgtcgtcgggaggggaaaagagaggaaagatccgtcaggggaagaagcgaacaacaattagacgacaagggagtctcctgtgttttcgccgggtgaccaccaaacagaattgcaggcagccaaaacaattatatgtgcatttgtgcatgcatccatcatatatcatcgcagctgcaagcttgcatgggccatcctttgcttgcttttgccactcaacaatggagtattgttttgcatactgtcagagaaacggctccaatttatttcattaatccaaatccctgcatcccctgcttgctagtaccttcttgattatggagaactatttcctatataattgtgttcataaatcgaaaaaactgctagcttcttctgtttttgttgttcatatttcaagttttcttaaaatgggcagttttttttttaaaaaaaatcttggactgttacaaaattcgcacgccaatcatatcgatcaaatcaaaacatcccgagcgtgtcgaaataattgaatttctggagcatctgcacaggccaatgaagtgcatttctgaggcatacatcaatgctgtggccgttttcgattgatggcgtgtggtttaattataaatgaaaggagatccaatgcaattcaattcaagtttggctttatgtgccaactatactccacaacctgcatgcattaagacagctgattgatgatgccacggcgattaaatgccattgtggaacattctcctacaaatctatacactccctaccacttgccatccatccatccgtccatctgtccacccatcaaattctacgtgaatctgaacatgtgtgacccagacgcatagcaaatcggcccctgtatatacgtgtaaatacgtatatatgcatgtctaaatacatacatatactcactactatgcatatatacgcataggcacctcaatgatatatgcatgcactctccaaacaaaacaaaatacattgaaaataattaattaaagctcctcaccagaggtgtcctaatttgatcacaagtcatgcgattagtcgtacaatattatttgcacaagtgtggtcaattggtcaattacatgaagatatgttccaaacttacttcaagtatgcaagcccatctaccatccgagaaagtactttgttaaccatttcattctctgtagtctctaacgtggttccaaaaacaagaacaactccctactatacagaaataattttcgcaagaccgcaggtattccttttcctagacatctcaaattttcaaccccctgtggagatcgatcaaggctagagctcaagacggtttaaattattcaaattatttttaaatcaatcaaccgccctacactccacacactactacaaaacatcaaataggtgtcggcattataggtgccggaagtgctaaaaccggcacctatatgccttttcccacttcccacgggttgaaatcgcaaaaaaccggcacctttaagcaattataggtgccggttcttattataagaaccggcacctataatatattgtaggtgccggtttttttttaaaaaatcgacacccacaggatcgagtcgagccagcgggtagatattttcccacggtggggcccacacccacggggagataaggtcgagcggtcgagctgcgtcttctcggctttttctctccctctctctacttcccttctctccatccttcttctcctctctctctctgcggcggcaggatgggcgtggacgggaggtgcggcggcggtggcggtggacggcgtggaggcggtgggccagtcctcgcctccgccagatccggaggcgtggaggcggctgtggcccggcagaggtgggaggggcggcgggctgggcgcgacgccctcccgtccgccagatccggcggcgggacgagaggcggcggcgccctccctccgtcggatctggaggggggcatgcggtggcggcctggcggcaagaggtggtggtgaccggcagtggtggtgccgtccctccgtcggatctggaggggggacttgcggcggcggaccggcggcaagaggtggtggtgaccggcggtggtggcactttcctctggtttttcctgatttttgttgttagtaaaagattgaagctgccgcatcgatccattttttacgttgtttgtgaatgatttttgtgaaagattcaatgttagtgaaagatttttagtgatgtttttcatgtttgttattctgtgatgttgtttgattggggattgggattgatttgggatttctatgttagatgagatcggctcaatgtatcggctcgattcaagccggtgcatcgagctaatttttttttggctcatgaacctatcaaaggtgccggttttaaaaatgcgatcggtgccggctctgtcatctgtgccgcttccatggtgccggttgggaaaacgccggttgggaaaactgacataaaggtggtttcccaaccggcacctttaacgttttctgcggtagtgacaataatttaaattaaaaataattcaaatgctcaaatttaaagcaagtggcataaggactcaagatggtttaatttttttttagaattacacagtacaacacatacactcacaatgcacaaacactcaccctatgcaggggcggatctacagtgttaacatcggtgtcagaagacaccgacaacttttggcaaaacctgcttatccatatattataacactatagtctaagtataattagcatactataacaccgatagacacgttatgacaccaatgaatcatttttctagatccgccactgaccctatgaacatacgcacgcaaaccctatccctatgagcatcttcgaatactggaccggctagagattgacaaagtcaccacagacacctcgttgtcgatgggtacatcgcctaccactgaaaagcacaatacagttaaatcctgaaaaattcgctcctatgggagtcgaacccaggacctaaaatgctactgaggctcttataaccactaagctacaggccctttcgcaaattatttttaattttaatttgagtcttagaaaatctgtattattaagagtggttcatgtataaggcctggatttcagcccaagtattcatagtatctttgagagaaaatctcttgtatacctttagaattttagctaatcccttctatacccctgaattttgcttacttccttatatacccttaaaatttgattttgatcccttccatacccctcccgtcagttgatcgtctaatttctataaaaataaccattttaccctttggatgaacatagaaatttatgaacattattaaaaatgtaaaagcttctcgcatgagactattatagttatgaatttgttgtgcgatgtattatttatcccaaaaaatatttttatataatgaaataaaaaatgtatttattttttataaaaaaattcataaaaattaggagcattcatacaaagataggaccaatgttcacaataattttttttatgaatgctcccgataaaaaaaatctattgtcctattaaaatttcaaataaaaattttaattatgtcaaaattttatgcactaattatttagatccattagtttcataaattgcagatactgcgcactcaaacaaaattttaatcattttttaagcttatattcaaacctaaagcatcaagggcaaaaaaagacatttgcaaccaaatgtaatagtgaaatgatggaaaatataatggtaggggcatggaagagatcaaattgaaattttaggggtatagaagggattgggtaaatttcagaggtacaaaagggattgagtgagttttcaggagtacacatagaatttactctagccttatcttaagtgagacacaatgcaccacactcacgtaggaaaaatgttccagtaatagtgaccgaaagttctggctagagctctttgcctagttgagaggttagaccagaagttcaagtggcatcaacagaaagtttggatcaagttctccagtcatcgtgatcgataatgaggttaagctatattttataatactccatatttttacctacactagtaatatgtccagggaaaatatgtccatatgtcataacgggtcaggtctatataataggggacagggtagaatgaccggttgttactcaggagcatgtacgcattgcacatgtgggagaaggagagggaagaaggacgactccgcttttaaccgtagtagagataaattaatcatcatttaattattagagttgtttcatatgaatcatgcttactcatgtgttttgtaaccaaaatactaccaacgtttttaatagatgacaccattaacttttggatatagtttaatcattcatcttattcaaacaaacttacataattattatttattttattgtaacttgttttatcactaaaaatatttcaagcatgatttatatcttatgcatgtgcaattctttttttaaataagtcgatcacttatgtgtctaaaagtcaacacgtcatctatttaaaaaattagagggagtacgtaaacatcatcacatttcttttgcaccacgataatagtatagaatagttagtgggggggtgtgtaaaagttatttcccccaataaaatataatgttgttttggacttttcaaagccaaacaaggtacaactttgacaactttattctttttataaatacgaaaaagctacaaacatttgattttataagagcatttgtattataagaaatttggctatacaatttctatgtctagggccaatatttttaatcaataattgtaattaatcaaaattgcaaggatcacgtaattaattaacaacattctttggtgactggaggcagtataaatgttgcatcattaagtcgcctgcaagcttatattttggaaaaacaaacttgaggaaacctatatatagctagaacttacatttttaaaaaggaaggggcttgctagtacaagactacaagatcatcgatatcaattatatcccctatccctagcacagaaaacattttttaggtggttggtaactcgtttacacgggtgttttttaaccgcttgcagctaggggtccatagcaatcgaggttttgcgcaggcatatacctcaaaccgctgcaaaaatcataaatctattttcacaagtgaatttatcaaggaccgacctgtgtaagtaaaaataggttttcacaaacagtgtataacccaccacctaaactattttcactgcgccttttattttaggccgcttgtgaaaataaaaacctagcgcctttctaaatggttatcgtagtagtaatcgacgctgtttgagatatcgatccctcgcacaaacagtcccatgcacatttcagtatggcggctattagctgaaggttcattgaagaagcacaagctgaggaagggcacgggatacatgcattgaatggcagcacgaaaggggcatgcaaaggtgaagttgagatgaatagctagatggagagtagagctggaattactctctctggagggggccgggctgatcagatcaggagatctctccagcatcgataccgatcctcctcaagtttgtcatgcagatgcattaagtacgtacgtactgcgagaattgaatggacaggaacaaattaaattgaaagctatagctagtagtagtagtagaagaagagagaaacacattaaattgatcgagatgggatgcagtaaatgagagactggattgatcgatccatcagcaagtgctgcactctggccgttgcaatatgtttggcatgcgttaatttttgtgaattgtagccgtgctgggaacttgtgcattccgatcctccttctagctactccagtctggtctcacacaccgtgcatatcacatcgaacgtttatatcccacccctgtttatatcccaccccaaaatttttcaatctatcacatcgaacgtttgaacacctacatgaagtattaaatataggctaaaaaataactaattgcacatattgcgactaatttgcgagacgaatcttttaagcctaattgttccatggtctgacaatgtggtgctaagtaaatactctctccatccacaaaagttacacctatatcacatttgagtttttccaaataagttggtcttatttgtagtctttatgcattgaagacttaaataaagagataaattaaatgctttattagaacccaaggagtcatctaaatattcattggttgcatggttgcattcactccttaattttgtaacatccaaggtgatttaattttttttcttggtcttggtgtcaaaagtaatatgtgtaacttttgtggatggagggagtatttgctaatgacggattaattaggcttaataaattcgtctcgcagttgacagatggaacctgtattttgttttgttattagtctatatttaatattttaaatgtacatgtgtccgtatattcgatgtgacacgccaaaacttttcaccggttatctaaacacagccatatatatgtgcattattgcatgcgatgatgtgccttcactagggatgtcggctgcgagtgggatcgactgtcgacaggcggcggctgacagagaagtaaaggtttctgaatgaaatgtgaatgcatgctaacggtggatgcatacatgctgcatgccttcagagcttctctcagctcttttcacgtttggattggatctatcaaatggttggctagcaagctagctatcgattgaacgatctcgactctgcagcttacaccctcggttttcaaaataaataaacctactactatggaatatgacacatcctagtactagaatatgtcatattccacactaggtttctttatttttttcttttaatttatagtttggaaaaagtctgaaataccctccgaactattgcgatagtacgaattagccccataaactacaaaactagacatttgacacccctaattcatcaaactggacgaattgccccctaatcactgttttgggctagatttgctgacatgggcatttccagtgtggcaagaaaaataaataaataaaatagtgggcccactggtcagtacccatttcatcatcctctacatgatgtaggactcactctcgctgacagatcatgtcgcccgaagaaccctctccctgttgctcaaccgattggctcaattgctcctctgccacctcgccctccgctactccatcaccatcccaccctgtgctcctcgttcgtaccaatggatccatgcaattcctcgacctaatctacgtataagtctaggagctcactgccagaccgcaccgctccaatcccctgctcgatgcgccggtcgaggagaggacggtggtggaggagagaggtcgccgctatatcattctcacacaaagctcatggatccatgacgaccttgttgctaaagcttgttgtgcgagagctagaagaagagggagccaggcagactgcgtgcaatgacaagcggttccctcaagcttgctttggacagagcttatggtgcccgcaaggtcggggaagagccggtggagcaagctcgtgtaggagatagagctcgctttgggaggattggatcaggattgttgtgatctcgccaccaccatccgctgccacccttctacctcgacatcgtccgtcgcctcgtgcacactcggctcgcacccactgcaagtccctcctcggtaccgccatcggggaagaaattaaaagaagttgaggggtcctgccttcacccatgagccacctcatgttccgcttcctccctatatttcccctcacccctcgatgacgagcgtatgcggcaagaaagcaacaatgtggtcgcatgctgttgtgccgaggatgaggaagcggaggaggtttgctacggaggcggtgctcggggtggtgcggaggctcgcagggctcctcaccacgcacgtggtggtccgatccatagtccccaccatctattggtgagctcacgtccttccatcgcttgctctagcaaagctccaccattaccgttagcgtggatctggggcaacatcctccacgaaagaggatggagactgccgccatcgccaactccatggagggggaccactggctgaaggatggaggccgtcgctgtcgccaacctatggagggaatcaatccgctgtccccctgcctggtccattcggaggaagagaaagataatattgaaggggaagaaagcagaaaaaagagaagatagaagagaagtagctgacaggtggagcctgcttattatgataacttttttggctgactagaccaccatgtgtgcaccacataggattaaaaccgctccgaaatagttcgggggagggagggttaattcgtctggtttgatgaattgggtatatcaaatgtctggttttatattttaggggggtaattcgtatgtcacaattgttcatgggggtattttggaatctttgctgtaatttccattcatgttctagtagtagtacttgttagcaagtttattttattcaagggaatagttatttacaatattgagtccattattttctatattgtgcatacactatttgatgtgtaaattcaatatttttttcatgtcgcacatgtaaatactttttataacttaaatttatagtttatgtagaccttggtttcacaagggacatatgtgacttctcattaatgtgagcgcccacccagggtttaccttggtatgaggggttaccatacctcgacggtaagcctgctaactgtggtaaccgtagatggcgctattcactgaacaatgggaatatcagatgaaatttacctaaaattcaaaaaaaatatatttaaatttcatttcaacttggtccttactgctaatgtataccggattagtggccctaatgtaggcccaacagtaagtttggttactgcattaaccagtgataaggcaaaccctcaaccctgtgcctctagcttgtatagaaggaaaacctccaattaggaataatagtataaagaagctatttaaatgtttccacaatggacatggtgatcaatcgcatcgtataagggaaactttgggttgtagcgaagcttaattcccttggagttcttcttggctttcacaagctatttctccttttcccttgttgctttttgaggcccggttgcttttcgtagattgcgtagtgttctctcctccctctcccccgtaacccctttagcgggtcacagttataaaatttatttatttcctgctaatatatcaacacgtaagtcttttacgtgataaaaaaaaagaatgatgtatgaaaacttgaaaattttcttgcgtaatagtgcgtttctcataacagggaacaagtacatccagtcaacagatactctgtaaagtacaagagtttgattgtaatgaaagattatcatatatatatatatatatatatatatatatatatatatatatatatatatatatatatagtaaatttgtttggtgctccatggtgcccgggcaccattgttgaaattgagtatatacccaattcaaatgagtatgaaactttttcaattacctaggtattaacattaactactttactaactagtttaaagcaagtttgaactgaatttgaacttgtttttgttagattttgattctaggtatatagcatccatacatataattagttaggtatgtaatcatgtattgtgaaataaagttaaatttgagttgttttgttgataagtataggtatgaatcaaattattataactaggtatatactcacaatttgaaaattttaaaaaatttgagtgattttgtgcattagataccatggtgcccgggcaccatggtgccccatatgagtgtcccatggtgctcatatatatatattgtatgtgtgctctatttctccgtcatagtgtactctctctattggaagctgtcacttgatgtcggtcttcagcggtgagaggagagaggggatgggtagtggagcctctcgccattgagaggacaaagatggatgctggtcactaacatatggacacgtgggtcccactatgtttctatttcttttttattgtaatgacacataagcatcatataacttgtcacgttggacaaacactagtacgaaatgccatgtaggagtcatatcagccgaaacagtccacgacattgcttcgagactatatttgcattagttttagaagttggggatgcaatatttctggttttgtagttgaggtattgaaatttatcaacctctatatgagggatgtaaagtggacttactccttgccttgttcatgttgtttgggctatacatagagttttgagtttgggccacaagatcaaatctacccattacagttgccccttcaaactttttctttgttccaatccaccaaaccaaggcccacaaagtactcaaccggtccactttaatttcttgtgcctgcaaagtacagttgtttttatttactagcatcttgcctttgccaaataacattatggtatattaacaccttcataatcccaaatcactataatcgagtgtaatttgataggttaccaaatttataggtgtcaagtccaatttgatagattaccacgggatttgatggttgtagtcttatggttattcacttttgggattaggcttttcaagtctacctaagcctgtgttttgtttgggatgaggtgggactggatcgacttatccctgttttttcggataggatgatcccattatctgtttggtttgagcgatacagtggtcctggttttctaaaagatggaagggtgtggcccacatattagtgaaaaagagaaagtttgttggattgatccgtcactttttgaggtgtgaagctaatctggatctttggggactattccctttcgggggctatctcatcacacccaaacacttaaaaataggttcgatctaacccgacccaccccatccattgaaccaaacacatgctaagagtttatgggacactcactgaataagcgaagccgtctcttctgatcagttctaatcaaacaagaattatagtgcagctgaacgattaatcctgtatgtatatgcggctatatatgtacatgcgggacgatgaagcaagttctcctggtgtaacacgatctagtgtaaatttagtctgatatatataaaatcatgatcataaccgatatgtcgttgactcagggatgacgcacgcatgatgcaagagtgacggacaaagaggctgtttggatgctatactaagtttgccaccattcaccatactatttgtgccacacttgcctaagttgtggcttacaaaaagtgagccacatcttagctagcaaaattggattgtgccacactttgttgagttaatgacatgtggggcccaaatagatgagaaggaatcttgccacaagtgtggctatgaaccaaacaatatgctaacttggtcaaacttgcataacatgaggtgtggtaacctttggcaaactttgagagcaaaccaaacaaccccaaagactttacgataaaaaaattatcaatctttgaagtagttaggatttacgaactaatacccttatattatcataattacatgacatttcttaatttcatggaaaaatctaatatattattagagtgatttaagtgccccatgaggatcaatcaaatctaatgcaaagccatgtataaaatcaaattagggtatgcattccctataaaaaggaataataacacatttcatgggaatatattattattattatagataatatataatatattttctcttgtcggtagataagcacacgcattcagctagtttcactagaacagatttgattttttccatacggctcaaatcgatttttgcatgcggacgggtagcccacaatgcgcccaaaggtatatgaaaatcgggattttcatatgcggccagtgcaaccagcgctgaaaacgacaacatgcgaaaaggaaaaatcatgaaaaaaaattaaaattccaaaactgaaaattacacaaaaaatgctaaccctagacttgtcgccgccgtcgccacatcctccgatcctcgtcctttagtcgaccgccgccatcctcatcctccagtcgccgtcgtcgttggtatcatcctctcgttgccgctgttgtcgtcttcctcctcttcccgttgttgccgccatcatcttcctcctcccgttgtcaccgccgacggatccacgtgggagggcagccgccgccgaattgggacgagggagggctgcgaccgatggatccaggcgagggagggccgccgctgctggatctgggtagtggagcgctcccgctgtcaggcacgctcgcccccgccgtggccatctcccaccgccaccgctgccgccgaagtccgcgcatgctgccctctccctctaccgccaccctcggtcgccaccgccatcgccggagcctgccgtcggagtgaggaaggaggggggataggagtggggggatgtgggagaggagtgggggctgggagagtgagggctaccggatccacgcagggcggtgccacctgctcccagccgcctcatcggtagcgttgcccactcctagtcggtgaggagaggagagaaagagagagagaggataggaagagacataaggagaggagaagaagagagagaggagaggtggtggaaaattttgaagtgttgagaaggaaaagagaggagaggagaaaatatctatgaagaagatgagggtattttcgcatgcggtacagttaagaggcccacgtgcgaaaatatatttttgcatgtgacccgttaagatgatcgcaagggaaaataagctcacttttgcatacggcttcttctgtggtatacccgtaaaaatcgatttttgtatacggacctcttaaggagccatatacgaaaatggagatgcaaccagttacggtccggttgcaacctatagggattctcgtacagaaaaattctttttttaagtagtgtttgaggtagaattcctaagccccgacaaacaatgttcagtataatctattttttatttattatatgcgtgtcacagcaattatttccacatgttcatgaacttcaaacaggaagacaaatatcgtacacatacctttttgttcatgcatgctttagcaccttcctgagcacatcgaatgcagcagtacggcaccttcttgattgatgggaatctattagttgctgaattcttcccaagagaccaatattatgattaggaaccaaagactcattgctcatcgaagtactcgaataattacggagctgtccaccatggagtcgtagagacttgtcatctgctgctgtggatagagactgggcctctactggtaatctcctgtagcggaaaaaacctctcctctttaatgatggttcagatcctgtaagtcttatttttctcatagcctgtccaataattcaatacagattaggcgttgtgaaacacaatattgttttctctagttacttttgagtgattttaataagtgtaatagctgactgccgtgcttaagcgacctgacaagcagctgaaccagggtaagcagaatggcagaaacagagcaaccaggaggtggctattctgcatgttttttcctttcgtttttgttctatttatccctttcctttggtcaagagcataactcattcattataatccaactgtaacatgactaatcatactgagttctattatctaacatcttacctaggttatcatcgagagaaaattcaatctgtagcacagaaataaggccggtaaaaaaaaagcacaaataatttccgcttccaactgataggacagaacgctcatttacccttagtcctctccgtattcacacgttaggctgaaccattcctgatcttcatcactcgttcagtcatgggagcaggcgagggcagtggctggcggaaaaagggcaacagcactcagtcgacggttagcggcttgcgctatggcacacgggatcaaggaatttgacgacaacggcggagctttctccgccgcaacgtcgacggcaactggcggctccttcccatccctaaacctcgtgatgataaactaccccctctgtcccatagaaaccaacctaatactggatgtgacacattttaatactataagtctacatatacccgtcctagattcgtttttttggacggagggagtagtttgttgtgtcgtcttcaatcattgatttgcaaaattaagctccaaaggacaccaataatttgcactgcggagcacaactgcattcttaacatctctttctccatctcctcactcaattcctgctttgtgtggtgagcacttggcccttccactgaatttctcctagggagagagaaacagggaactgttgcgcatcggcgataaactgcgcgtctccgttgttctccatctttgttctagggttagttagagatgtggggaaaacaatttgaagatatgctagagacctccgttaggtctagatgagaaagaaatgctattgatagaaggaaaacgtatggcttatgctaccagttgaaaatggaaactttttgtcctattttttttggtaccggtcttatttctgtgatatagactgaattttctcaatgattaaacatccaagcagaaccactgcactcacaagactacatacgcacagataaatgaggaaaaaatcaatctaaacacaaaatacttaaagcaaagcatttgagcccttagctgatcaactattttcaaatttgttgacagtactatgatctagatagatggattggtgggtgacccctaaacatacagtttccaaacctttataatataattctgacaaaacatgtgactattgcaaaggtaaaaataaaaggtttggagcatataaaatttagaagaactttgcatggtgacaaactcagagattgggacagaatcaaaattagttgggatagtctgaatttgcaggatggttgtgaagacaaaatctggtggaatttgacaaaagatggtgttttttctgtgaaatctttttatagagctcttaaaatgcaacaggtatgctttccctagaaaatttttttgaagtttaaagttcctttgaaaatcagaatttttgtttggctgtttgttaaaaacataatactcacagaagaaaatttgtataaaagaggttggagaaaacttgataaaaaaaaggccaattctgtgacaaagaagaggatgttcagcatctgttttttattgtccaatggccaaacttctttggaatattatgagctgtgctttgaatgtaactcccattttgagttaccaagaactttttggtcattggcttactggttatgataaaaacatgaaacaattgattgtggtgggtctagctgcaattatttggactatatggaaatttagaaacaaagcatgttttgagaataacttttcaaaagatcccactgatttggtctttgtggcttattcctgggtggactcttggacatctctgcagaagctggaagcaaaccgaagaagactgcaattggcggccatgctcataagacaagttgcaagtgaaattttcggttcaagatatggatggagagaaccagaaggactgaaggctgaaaaagttgctccataaacttatgatgtctgtagtatacctcctttgctgaagatagctgttgctccaagccttttcactactaaaaaaggatttttccatgcggtcccaaaggggtttttgcatgcagttagcccctccgcacgaatcaaagggtctggaaaaattgctatttttacatgcgggtggcgcacgcaaaaatagaaaacaaaaaaaataaaatcgaaaaaccgaaaccctaacactagaagctgtcgccaccaccctcctcatgatcgctatcgtcgccgttgcactcctcgtggtcactgtcgtcgtggccgtcgccggatccatcgcccccacacatccccagcgccggatgccgccgctacgccttcccaccgtccgagcccgctcctgcctaccgccagatccaagcggggggcaaccgcctccgccagatctgggccggggccaggggccggtcgccgtcgcccctcaccgccttccatcatcgcgcgcacgccggccaccgctcctgagctgcctccgccgtgaccggctgctgccgctgctcccgaaccgccttcgctagagccagaggaggcaaagaggctggagccggaggaggaggagaaggaggcagtgccggcgccggcaccgtggtccttcaccgggagaatgagaggaggagagggagtgaggagaagataagggggagagagagagaggagaagaggaagttaatttttttttgaataggttgagagggaaagaggaggattggacttgcaggtgggcccgcatgcgaaaatagatttttccgtgcgggtctcttaagtggcccgcctgcgaaaatatattattttcttgtgcgaacctgttaagaggaccgcctgcgaaaattgatttttgtgtgcggctctcttaaggagccgtatgcgaaaatggaggttgatttttacagacgcggtcagttatagtccgtctagaacctaacgagggtctcgtccagaaaaatcatttttttacagtgtttgctgtaattttgcctataaactctgcttggcgatatgcctggtctttaataggcctagtcttttgctgttgttatctgaacaaaactctgtaagatgatgctcatttctagtaagagaaatggggctgcaaagccctagttcaaaaaataaaaaaaaacgccgagcaaccatgacttaccagggatagagaacagaccagacaggagaatgactttctacttttctagatggtaactaatagttataacttggagcctaagaaattaattatcattatctgctgctactctctgcatgctatgctacaatgtataccatatggccctgttcttttatccaaataaacttttggatactcgtggcacgtttttcaaactgctaaatggtacgtttcgtgcgaaaattttctatgtaaaagttgttctaaaatatcatattaatccctttttcatgtttgtaataattaaaactcaattaatcacatgttattaccacctcgttttacgtgaaacacttaatctatatctttatcgagattcaaacaccacccatatatacacaacacagtaattaataaggcattatgaaaactaacaatgtgaatataaaatctcattggtaacatctgaatacaattacctttttctctgcagcattcggagaagacgtttgttcaactggcttggtttgacctaaggtccattaaaaaaataagggttcattctaagaaactcaaaaacagttacttaaataataaacacacaccttcctgaaatacgacgctgtaaaaattatccaggttataaggagaccttcaagaacaagttgaagaaatagttaattatcaacaaaccaaatatccatttgcatactaaacattactaacattgaatacagaggtgatatcagtacaggttcatggtgtcaatgtactcttccttggggcaaaacccaaattccttgagaatagatgagacatgcgcaaggacctccacgtgggacacctggatcacatttaaaccgttgtatcagatagataaaaaggaaaagaaagaagaaatgatttagagaaaatttaattatactagttgaaatgaaaggaagttgcaatcacattgaattcaagcatacatgttttcataaagtttgtaaacaaacatattcaaaattgccttaactatggccatgtttagttccaaaataatccttcaaacttccaacttttccgtcacatcattctaatttcaaccaaacttccaattttggtaactaaacacagcctatttgtcttgctttacgtacaggattagaaaccaaagaatacaagtagatggtccagaaggtaggcacaggcagtcttttagtcattcaaatatcaactttgtaactataattaaatttataaaaaaggtataagtccattttgtagcacttgaactttgcttgcagtccatttttcaccctaaactggttttcttcacccccccccccccccaaacttacgaaactggatcacaaatctcacaccaaaaatataacacggtaacatgatagtggtttctcgccaacctgaacttcaattcgatatgttatttattgcacgatcaacatctgctaatgagtaaacaaaatatataaaactgtgtacacagagttgctctgtatacaaggctttgctgtgcttaccactaaaattatagaggcttgttgcgtttataatatttggttattctattaatatataaaagtgacattttttatacatatagtttatgaacgtttctgtcaataatgttaatcagttttaatgtaataatacttccatactctaactcacaagcacaaaaagtttagtcaaaaagaaaaaacaagcacaaaaagttcatacaaaggcacaacaatcttattttactatgtgggtcttggcgttcatgattcaactacagaactcagatattggaatgcatatcaccatctgaaaggaataccttaaaactgttgtttaggaaggctgagcttcctccaaaacctggttttcaaagaagctagtatgaattaacaggctgaatcaaacagggccaattgtacgggatagggtaccacagggttggttggagaaaatttcacagggattacttgtcaaatggtgtgcccaaaataatgtatctaaatatctaatctcatcactaattcagtcctatctcaaatcaacaagaggattactaatctaagctaatctatttcaaggatatagccagttagccactactactggaaattaccccaataaggtgcagagggtttcagcttctcaaagcagtggagcctcctacatcataagcttcatacgaaagctcaagatgccaccaattttgaggaagcttactcttgtgatagttttaacatgatattgagaagattgacagaacaggaccgatcgttcaccacttctggggaagcttaatcttgtgaatggtttttacatgatattgaagagttgaagacagaaatgaggactgaccgttcacttacacgctggatatgctaccccatgcacactatagtagtacaaataatgaaaagtggccatggaaatcaacaaatcactagtattcttcttgctcatattagggaacaatggaattttggaagtaactagtgaaaatactaatgccaatataaaatttactgtaagaggaagaaatctgatggcactgaatccaacaatagtggtacctctgaatgtgtctgaacgtaatcataaagagcctcgccagcttgcgaaattatattataaagcagacattggcaattcaaaagtgcttttctttcctccaactgcttatgtgcctctccattacctttgtcagacgttagggaatcatagtctccaaatatgcgttgcgcgatgatagaaaacccattaggtttgcccttgcgaaaatgtttttgggctgccaggaataaaactgtggcctgtgcaagcttgccgttcttcatgtaattccagagctcatcgactacattatctgttttttgggcaagcagtctaatcacctccaaggaaactatctgcacaataataagtgactttcagaatttgtatgcaggcaagcagcttggaataacttcatgttacatcttatttcctctaatcatatatagtaagcatgaagtaggacgaacctcctaggctagctccaagcaggataaaatctagtagtatttacctaagttaacttattgtctataaatttcaaacaagaacatgccttagcacatgtcaaaatttcaaaagatgacacggaaaaacttccttttgtcatgctgaaaagatagtatactttgggaagatcgagagataagtgaatcaaaacaaaccatatcaggtaggcacagcagatgaacgagcctgtagacgcaatcctcacgatactgcataggagacacattgtccacaagacacttatgcaagcaagtattctcaactgcaacatggagcggcagtagccgtccctgatcaacgccggtcgtaccatcatcagcgagtgttcttacgtttgctgaagctccgtgcctgaagagcaacctgatcatccgaggcgaacaccgttctgcagcctcatggagagggaagcatccatacgggctcatgcagtttggattggcgtgcatcgagccgaggccaggtgccttgccctccaacacggctttcatgcatcgcaaggcattgtacctgatcatgaaggttaaggtttctgaggtgatggtgaacctgtatgcgaaggttgaaggagattccaagaacatgtttaggaagcactggacgctgtcctctgccatgacattgctcaagctgcgagatatttcagagaaggcatctcgcaccctctacaatattgggtccatcggcaattaaattaagagaggtgaaaagtggtcagtttaatttccatgtaattaagaaatcaaaacataataaagtatcattgacatgcactttttgaaacagaacattttgtaaagctctttaagaaaacagaagagacgatttgggtgaaataaaatgcggcaggattgggaaaaaaaaacataacaggatgatttggcaactgaaatctgtaaatgaagattagagaaaaacctcaggagtagggtctgggataattatatcatttggcatggacttggcgacccaagcagctcttagattcagccactggaagagagaatgtcaagaaacaggtaagtaattaagggaagacagaaaccgagaggaggatcgtaaagatgggccaccatacctcataggacttttttctatcatatttctcaagaactagaaaaggacaggaaggatccatgttatctacggttgctccttctttgcccatattttcgcgcaaacttgctggcagtacatgattgggaaatctcaccactatttgcttgtctgaaacaaagaggattgagtttcattcaaaagaatattataattttgtattgttagcaacataatgtaaggcatacatacaaaatagtaaaatgtgatccttattacgaccacgaagacaaaataaatgatgtctagacgacccgcagagtggcactttcgctagcaatttctatgaaaacacgagatttgaaataaaagatgattaaatattatggaagttactttcgtgaagaatctagcaatatctatcttacattgttcttttatattagtagtgaaagtttattattttgatcggtaggaaccctactaaaacgatatatgttttgagggcacatgtatgctctacgaaagggcatatagcctagtggttacagtgacctgagtagtacccaaggttctgagttcaaatcttctatggagcgaatttcagattgggttgtttgtggggctaagttccctacttcaatggccatatatatcaaaaataaaaaaaatgtatgcttgactgaaatgtaacacaatattgtgttgcacaaataaaactagttaagattgatatttctgttcaacaaaacaataaaaaaaagagtgaaactagtgattactgatgccgatcaacatgttcaagttgctctcgaccggttggcggcagagcaacagaaattaaaggagggcgaaacagaaaaacacaagtgaagacgggcttcaattatttgacatcttgacccactctcattcacccagatgatcccacatgttattttcacaagtatcaatcaaaacaattgagcaaagaaaaaagtgttaaattatcaaatttatctagagagagaggaggtggcgatctgcaaatgtatgattttgaagatgcaaaaggaaacgatatggtaattgaacaacaagaggaagacaacaaagaagaagacgatggtgatatcaaaaactgattaattgatgtattacctggaatcgattccgacatggcctcccggagattaattgggcaagaaatcctggatcagtagagtagaaccaaccagatctccatatgaatgagatgagatgaatttgtgtggaactagaggcgaggaattctcgtctagggtttcttttttcttttcttttcttttcttttttttttgacaaataagcaacgcaaagaaaggcactcacatccatcatggtctcatgggctgggccatcaggcccaatccactccaatcacttcccttccattccacgactttactgttaggaataagttcactttaggtcccttagtttgtcaccagtctgaaattcatcctgagcgccatatcaggtataacgcgtcctttaattggcaaaacagtgtacccgaggccccaaggaagtatagtattcccagtttcagcagacgtggcagctgaatcatcatgggacaaacatatcagggtaatttagtctaaataaaaaaagaattggtggacccacatgctaggagcatgtgcgacaagggatgataggatgctgagtcgtcgaacggttgaagtcctcggtgacgcccgccgcgtgcgcccagttcctctcccgcctgtagggagagaggggatgagagggttgtggggcaggggctaggcaccgcacaagctcctcctctcccgaaagcgtgccgccgcatccttcctcgtgcgcgaggacggcggccacacgctgaagggcccgctcaactcctctctcgtcgaccactagcgcccgccgtgtgccgcccttctccagttggctgtcaccctgaaggttgggaaaagagaggaagagaggatgacatcagagagcatcggtggcgtgggatcatgtgctacgtgcggtgcacagggccacaaggcacgggtggcaacagttgatctcctccatctccaactcccgcaccatcgccaacgtcgcccgaggcaccttccgactctacgacgccaccttccgtgatgcgtggagaggactcctcccggtgttctctgtcatcaagctggggtggtggtggggacatcgcttggcgtgaagtcaggcctgctaccagccgcctgccggatgatgcaggacgcctcccatgtccacttagtccgcgcccccactgtcccagggctgccttggcctggtgaggatggcgaagagaggggagagagagagaggaggagagaggtttctactagcatgtgcgggccacataggtccatgttgactcagcacagcataccggagttaaagcgccacgtggaactaaactaggagctatgccgtcttagtacgaaagttgatacagtcttacgagttcggctacatgttatacctgttattgcatttcaaggatgaattttagactctgcaacaaattaaattttagactttggacggccaccgcatccgaggcatacgcccccaggaatgtgtgccacgcacactgctagacatagattgtttgttggatttgtacgagcatctcgaagatgtcaaagatgaaggcgttcatgattgcacaatttggaagtgaagcctttacttgaatgcacctgctctctgcaccttgaagatttagatcttgtatgtctcgatatgtatcactacgcctcagtaatccggaggaatgaggaccccagttcccatatctccgacacagtcatatagtcctctagttaaaaattaccacttatatataatcgcttgatctcccaaaaagatctctctatcaatgatcaccctcaactttggctcgaaaattttgacaaaatgaccattttacaaaacttattttaaaaatagaccgtgttaaaaactaattctaaaaatgaaccatcaactcagcaccatttatagtgtcttagcaccaatggggttggcgttgagatattgcctgtggtgtcacaaacgccaagtcatcctagctcaccgctgtgtaagtggcgctgaggtgttgatactatatacaaacgcatcggctagtattgttagcaagttctagtaccctggtggcagagcacttttttttttattttgtctattttttattttaaaaagtcacagcactgtgaaatttttggataatattgtctactgttctcccctttttttattttgtctattttttattttaaaaaagtcacatgttctgtttaaattttattgaagtttcaaatttgaaaagaaaaatgaaagttgaattataatactaatcataataaaatatgtaactcaacaagtacatatttgcatttttttacttggaaggaacatatttgtataatatttttctaaataaaatatttagcttaacagctataaatttacatattttcgatcttaacttagaaataaaacaaacttagaaatcacgtgaactttcaaatgaagtatatttgttgatgaaaagaattaattataatgttctctcttcataggaatgaagtatattatatatccacttctcaattttttatcaggacatcaatttatagaaattaatttaaaaattatatgatttaagtttccaaatttgtttgtccaaatttgtagtgttaggatgagtaatattgattttttatgagacggatggagtaatattgatgtgacgcaagtagctcagatatgaccattactatcttatttatacatcaaccaaaggtgcatatgttctatattagatttatttgttatatatttgaacaaacattactacacaatgagttttgtgtgttttcctttgtagaggtacttgctttgtgaaggaaaagagaccgagcgtaaggaatgcatggatgatcaaagaagttgattggggggcaaaccaagaccttctccaagtccactcttacctcaccacgtcaattttggtccataaaaggcaagagataaagttctacacgttttggattcggattcgggccacctgacagcatcaacttcaaatgtacctagccgctgatttagaagaaatttaggggcccatgagtacttgttggaaagcttatgaaatctactttcatatggttttggtcccacgtcaaaattcccaccgagctatatggaatctgcaaaacaagccacatatatcatccagtcggaatctgatttgggttttgggcctaatgtgtcatgggctaagcccaaaggggtgtgcgccctagggcaaccttaggacgtcctaaattatatttattcaatagccatcatagtttaaattatatttattttgcttagattatttctgccattacagtttcaccgctagattagtttgtagaaccccaaattcaagtgcttaatcatttatatgcaattgagttgaaatctatattttttttgcttgtgttgttcgattaacatgcagagattagacttctaagcgaggtcaaccgggcagtgcacggttgataactagaggagatacggtgctacgattgcagagtccggatcatgttgattggaagccggatcgtgtgtttcaagtttccactaaattgagagttatcaatacctatcggaagatcgggactagtatcctcatcaaacatatttattatcatatttttctaatttcaaaaataaatttatagagaaaaagaaaaataagaaaatctaaaagttgcagaggtgtgggcaaaactccccagggttgttgctaaagtcctccaccaccatactagcctcgataccatgtatagaaaggttatagttttatttaatctagtgtgccaattaaagtggcggtgagctaggctgaattgtcgattttataccacctcggataatatctaagcgccaacaggccgttggcactaagacactatatttcagtgctgagatcacggtttattttttaagttaatttttggttctattcttaaaataagttttacataaggtgattttgccaaattttcagaactttggctacatgtatgcatgctcataattaaagtaaaggaaatgcgacatccaatcgatatgtttaatcacatgacaggttactttaatttcctcttgtaagtatcgttttgacagcaaaaggaatatatgttaccccttatgtcactgcacatgtaatccgacatcgttcgaatctaaaaagagatccatcctaattaacgtacggcctcaagaaccctagcttaggtcgtcgtcgttgtcgtcgcgcgtccttactcccttagccttgcgattaagctaacctctttcctccattaaatacctccacgttcacagcttcatgcaaaccctcgcgttcctctctcctccatccacctgtaaagctaagcttcttcttcatccatgtccttatcctaatctctctctctctctctctctctctctctaactctaagcttgtggctaagctcaaagctttagctatataggggtatataaaaccacagccctagctaaacaaaaatagattaattagccaattaagtacgtgacactcgagctccatcatcacaagcctagttagctactgcaactaattaactttcgtgtgtacaaaatgtcgcagctgccgccgccgatggccgccgccgccgctgcggtgggcgtcgccgacggggggaggacgaagaagcgggcggggctcccgaggctgctgcacaagttcttcttcaaggtgctgcggctgaggccggcggcggcggcggcggagcccggcgccgccgcgttcgaggcctactacggctaccggatggtggacgagtactactactacagctacggcggcgccgccgggccggcgtcttgggcgggcgtgctctcctccatcccggaggaggagagctccgacgagggcacgccggccgccgacgccgccacgctccgcaaggcgcgctccgactccgaccagttcgtcgccgccgaggccgccgccgtcgccgtagtagtagtaaattaccgcggcgcagctagctgagtgagctaagcttgctatactcagctctatcctcatcgccgtccgatcagaaatcgacggtctggatgaggtcatggacgtttcagatcatcttctgcacgcatcaaccctcactcacgcatctcaaagttcatcggacggctcccgagaatagaggcagaaagtgttacatctcaagccagcatcggatggtccgaatctgcacttgtgcagtttgcatgtatcaaagatcaaatttttagtcttgttgttaattagtgacaagattttaatttgtgtagcatagagatgtgtatatatatatacttaagtagtagatgatagataggaaaaaaggaaaaaagaaaactctgttatttgagagtgaaaataaggtcacatgtaattcgtcaaggggacagtgatcactcacgagaaggtagttgtgtaaaaaggcaatagtattactaacattgttgtgtcatttttgggcagcagtaaaagctgctgtcttgttgacatcaccagtgatgtgtgtggtttttcaacttctcaatacatgtacagtagcagtggccagagtagagtatacattggtgtactactactactctctctctcttggccggtcacatgttcacttgtaactttttcttcctgtatggttcttactggttgctacaacaactttggagctatcacaaaagcaaaccttttcattcatgtgtgttgtttgggaaaggagacctttttatatttccctttatttttttcttttaagagtaaatttcacaaaactacatatacttggatcaaattatcacgaaactatagatttaagaatatgtatcataaaactacagatttagcgtcaatcttttcgcggaactacaaatttaatgcaccatatcataaaactacagatttagtaatgaaattatcaaagaactacatattctagagtttagatcatagcactattattaatttaaagctataaatatgtagttttgtgataaaattattattaaatctatagttacgtgatataataccttaaatctgtaattccgtgataaatttgacactaaatttgtaattttttgaaacacaatcttaaatctgtagttttatactccctccgtcccacagtataagggatttttggtttttacatgtaacgtttgaccactcgtcttattcaaatttttttgcaaatataaaaaacgaaaagttgtgcttaaagtacggtagataataaagtaagtcacaaataaaataaataataatttcaaaaaattttgaataagacgagtagtcaaacattgcaagtaaaaactcaaaattccttatattatgggacggagggagtaatagttagatcaaagtatttgtagttttgtgaaatctactcttcttttaataacttaattaatggctaaaggtcaatattttcccgtttcactttctcacgtgttattagtttcacatgatgtgtactagttgtgtacgttcagataattttgtggtgatccattatattgtaagaggtgttgatccacttgtcagccgacaagtagatggaggtcaactatgatttttagatttttaagaaagtggttattctaaatttgaaagtaaaagcgaaaatttagcatatgtgcttagcaacttattttttccttgtcattgttgtagacaattttttgtaccgttgtccaaagtacgtagtatatataatatatttggtacaagtgcttagttcattgttggattcaaacattcaaaaccagaacgattgatttgcccctgtggatttttcttgaaaattataacctagcttttggcatgcagaggcgcggagcccaaggaggattcttgtgttccaaaggagtcttgttttgaaaaaagagaattgctctatatatactgatgggatatactccctccatttcaaaatgatctacatatagttttttaggttgttcctaaatgatctacataagtctattcgttatttgtgcattggagtaaatggaaattgatgcatgcattcatgcatacaagtatttataacccacatgcaatatcttgatttgctattagctaggaaatagtggtgattgtgcttgcatagagtttgttgctagagtaaatatagtatgagggagttattagtttttcttggtcttgatgtacctatgaaatatgtagatcaatttagaatagagggagtatttgcattaaatttaaattaacattgttgtcatatctaaatccaggctccaccagaccaccactgttggcatggtagcttgcaacatgtaaacacctactccatccgccccatattacaaggattttaacttttgcttacactgtttggccactcgtcttatttaaaaaatttctgtaaatataaaaaataataagttgtgtttaaagtactttggataataaagtaagtcacaaataaattaaataatactaaattttttttgaataagatgaatggtcaaacagtgcaagaaaaaagtcaaaatccattatattatgggacggagggggtagatcgcatttatttattttccctttgcgaggtacctagatcacatttccaaattcatgcaaaaatactagctagtgactctcacgtgattttcgtaatattggcagtttgcctaacaaaattgcacttgacagttgctcaaactgcctacattaatttggcagtgaaaagatgtagttgaaaactcaacctcgtttaagagatatgaaactgacaaatatctaagactaccatttttcttgtctaagaacaagacaagaatcaatgctactgttttttcttcactgtttgttaatttcatatcttgctaatgaagttgagttctctttcataatatttatgattcggtttccatggttttagggcacggttagcaaagactctagctcctagattcatctttctgagatttaactcctagagctggagcctggagcacaacaaatagttcagatgtgaccaaaattggaatggagtgggctggatcattcccataaaatgaactagagggatagatttcggtagctccactgccccactcctaaccagattaaaatgatacccagctcttttcgtcgaatttacaaggaaattgccatcacaccccttccagtttcacttctcccgttggagttagcttgaagttaggatatgagtttgaagctctatcagacaattaatgcaggcagtggtttttcccatacatgaactctgtttgcaagagggctaggtgaccttggatttttcatttgaggccttgcgcggaataagttcacttaccatcccccatctttacatcaagtttaatttacatccctaatcgtaataccagaataaacctcaaacttgcaaaaccgtttaaaattaagtcctccggcagtatagatgcatgatttccctagcgtgaaatttgacctggtccactcccgctgactagatgcttatgtggcaacctcactctcttaccttctctcttcctctgctttctctccctcctaaagcctaggagcgacgctgactacgggcagcgaggaggctatggtggcaagtgttacaacgaagtggtggctacgaggcggcgagggcagttattttgatcccccatgaccgcccaacactattccaaaccaagttcattgttgccatggctgccatgggctggtccgacctatcgtcggagctcctctctgagatcgttggcagtctcatcaagctggcggatatcatgtgattccaatcgatctgatcctcttgtcgggcggcagcaggtagggcggcggctgcgataccgtcgcagtcgccatggttgcttctcccatccttcccatctcagctcttcttctgcccttgcgaggacttgcggaagctcgctctcatggtggagtcccaccactccatcgatctcattgacctctctatatgtccctcctccgccccttcaccggcaccatccacgtcgtcctgccgctcctggccttcttcaccgagacggatgacctggcctgggactggtccccgtactgtaggatcgaacagcaagaacaaaaacttttagcagaattaaaagttatcctctaatccgatgaagatcggtttgaccggagttgatctgctagtctgaccacgcctatgccaccggtctgatcgatgttgatcgcccggtctaaccacaccaaagtggcctctgcctcctgtcgccgccggtggtctgaccgccgtgttcccatcggtctgactagcacaatgacgtcggtctgaccgtcggtgtctcgtcggttggaccaccgaacctagcaaacacaaatcgaagatctctcaaagtagattgcaactttattacttctctctgtgatcacaaagtgcaacaacaacactcatcacaaaaatctcgactaaactcgaaactctaacttttctctcaactcaactctctctaaagcgataccgggaggcctcacccttactctctatttatatccgaggtaggcagcctaaagccatgaaccaaacttgtacaagaagtcctaatcccctaggaaatcttctcgtacaagaaacaaactttacaaactccaattgtaccaaatttagacttctttcaaattcgactccgcatcccatacgaacacaatatctccatcgtatgtcatatggaatcttcaccaaccacatgcattgatctttagcctaagcatcccgcatgatatcctgatcgtccggacgttatcttctcccaagttgactcctgatccatcaccggcaatactctccctaggcatcaagaccatctacacatgcatcaaccaagaaaccatatctgagcactagctatctccaacttgactcattgttatcaaacaacaatattacatacgcatagtatccatctagaagtcataaacatgaactatccacggatatccaacaaaacatctcgaaatcgaaaccgatacagagtaactgcatgcatacctcaggtctgaccggttctcacctgtcaacaacagttccaataatctccaacaccacttcaccaataatatccaaatatcaaaacaaataatctcatatgccaattgattcactactagaaaaataatttatcaccacgaaaaaaatcgtagcatcaatgctaaaatagtggcaatagattcatgttgctacaatcttaaaatcgttgctaaccgtagtaataaatagagtagtaataggttattgcaatgatttttatttagttgtaataaattttgatattgtcataaaatggatgtggcaaaaaatatatattgcaacacttcatatcgttgcaataaataaatattgccatcactccatgtgtggcattagttctacgtaccaaattaaatgttccaatattaatttatcatcctaactatctttttttatatcttctcatggctgggattcaaacccaagatctctccctcacgcacgctctccattaccaactcacctacgcatcaattttgtttaaaaatgcatataattccatttgagcctgcctaactgaaatttgaatcatgaatttgaatatttaaaagatttcaaatgaaaacttgaagttgtatatctcgtcgagagctataaatttcatataaaatttgtcctaatctgtgtccatatgaaaagaataagtcaaattatgagatgataaattttttattgtaaagaatttgttgatcatggcaatagaaatagtgtaaagtaccatatactatgaaaattgccacaaaaattaaatttgtgacaatagaacatgtttttttgtgatgataaatttttcatttcctatttcaacaaaaatactaaataaaacaacgatcgtagatcgttgcaacaaagtataattatttgccaaaaaattatcattgcgatagtacaatatattgccacgaattatttttcgttataataaattggtggcatcacggcatcctgcggtgagggcatccgacccgcccaccgccgcttggccccccatcggccatggccggggcgtctagacaggctggagtggatgggtctgctgcggcagggatagggagaggctggcggaaggaacgctgctgatgtgctggaggagatcaggagtgaggaaagtggaagaggtattgtggttttggaaattataaactcgagtaaagatgagggactataagtggacttaggctgtgttcgagaggaggggttcacgcaaaacgatgttcgcattaacacgtgattaattaagtattagctatttttttaaaaaatggatcgatatagaaaacattttgcaaaaaaaatacaccgttaagtagtttgaaaaacgtgcacgcggaaaacgatgatggagagttggtaactcccagccaagaacgcagccttattcctatctgcacatcccaaggtgggctggtgggctggaatccataaggttactgaattcggccttgttgattaagccttgtccgaacagtacaaggctggcccataacatgaatgcgcaggactagatttcagccttgacaaaattcaaggccttcagatttcagcctagatttcagtggactcatttatgaagtcggtctagatttcagccttgacaaaaattcaaggccttcagattagactggcggatgagcaggaaataattctcccaaattttgtgtcgaactgtgatctcaagaaacagcttttcagttacgaatttcagttagcttttcagttaagaatttcagttacgatcagaaatattccttgcgttatatataacttaaatgccttctttaagagattaagtagttttgattgaaattcaattatagaataccaatcttggtgacacagcatcaaaacgaattttgatacgagaatgtatgaaaataagctgaaatttctcaagcttgctgagttataaaattgaagcagaataccccaatccatacgaaatgttacgcctaaaccagaccaaacgcaacagataacttcgcaccaatcaccaaagctactgttttctccattggattcagagaagagaatcctcgtcagcgttaggaccaccaccaccatcgccatccatggcgactaggacgaggccgaggaggacgtacagggggaggcgtcgccgccgccgccgccgctggccgccgccttggtgtactcctccatgtccctcttgtacgccgccatggcctccgcggccttgccgttccacgcctgcttctccgcctccccgagctccttccacttcaccgacacgagcgcggtcagcgtggagctcgccacgccggggcgctcctccgccagctgccgcctcgcctccttgctgaacagcaggaacgacgacgccggcttcttgggccggttcgggtcggcggcagcggcggcgccgcccaccttcttcttcctctgctcctccttggtcttcttgatgatgttgtccgtcttctccttcttcttgagcagctggagcgcctcctgcttcatgatcttcttctgctcctcctcctctttctcctggcacgccgcctcctcctgcttcctctgccggtacgccgccatctccacctggtactcctccctctgcttccgcgccgccgcctcgaacggcgccttctccgcctcggacatcgccttccactcctcgccggtgatcctgccgatctcggggacgttcttcttctcggcgacgagcgccgcgcggcgctgctgggtgtagacgaagtaggcggacatgggctgcttcggctttgaggggtccttctccttcttcttcttcttccctttcttgctcgccttcttgttgtcaccaccgtcgccgtcgtcgtcggcctcctgccggaacttgagatactgctcgagcagctccttggcggtcctctgcatctgctcctcctcgagcagcttcatcgcctcggcctcgcgcttctcctgcccgaccacctgcaggtacgcctccttctcctgcctgtacctctcctcgtacggctgcttctcctccgcgcccagcgccttccacttggctcccagagcgttggagacctccttgaagtcggcgtccgggctctccttcttgatctgaaacaggcaagcatttcgtcaaacatctgacgggcagtaaaacgaagcgaagaaaatggtgcgggtttcgtacctcgttccactggtccttgcaccagaggacgtacgccgggcagggcttcttcctctcatggccggccttgcccttgcccttcttcttctctccttcctggtctttctcgatcaatgccttcacgagaggaatgctctgcaaggcaaaaccaaatcgaatcagatcaaaattcacaagaataaccacgaagaaaatggatgcagaaatcagatcgtggctcaaatcgcgcaagttgagatcgagagcataccacggtgggcttgaactccttggcgcgctggaccttcttgagctcggcctggaggcgaccctgctcctcctccttcctgcggatgacctcgtcccgctcccgcaccatctcctccgccttctccttctccagccgcagctcctccagcatcccctgcagctccgacaccgcgtccaccaccgacgcctgttcctccgccgccgccgcagccgcggccttccccttgctgctcttcgacgtcgccctcttcgccttctgcggcggcgacaggatcccggcggcagcggccacgtcggccttcccggcggagatgttagcgtcgttgtccagcaccgccgtcagcgccttccggcccctcccgcccttcctactacccgccgtcgccatggaatctagcacagagagagacgagctagggtttcgaatcggaggaggagatgggaatgaatggtcggtgatctgattcgcgcgggattttatagaggtcgaggagcggaggcagcaacggtcagaattttttggaaatttgaacgtcggatagagtaaggaaggtgacgtcagcgtaacggctagtcgcgagagtcactggcaggtggggtccacgcggggttgggacttgggagagatccacgcggaagggatcggaccgttgccggaggtggggccgggttgtcagcggcgaggtatccgtggacctgttcacacgggtgatgtggcgcggattattccattccattcaagccgatcgagtgtgaagtgaacggctgtgattgcggcgggaggagcggaagggaaagcaatcgacgggtgggatcccgcgtgtccgggtgttagtgatctgggccaagcctaatgggtcaaatttggaagtcaaccggcccaagggcccaagggtgaagagacaggagttgtttatggccttttagcccggcaagggagatgtcctaattttgtgaaatttagcccactatttgattggaaacggttcaaatttaacacatgttacagctccatacccaaatggagctagaacccaactaaatagttttcagctccatctagaggtccaaccaaacggtttcagctccaccaaaaaagacagctccacaacttcactctacaccctatttctaaagttaaatttaaaagttaccctaattgagtagaatcctacgaaacaaacccaactctagatccaaagttcttcttaagatcaagttatttctgccttgaaatattcctgaagactattagggtgatgcattttctacatattttagaataaaataagaggatcgggccactttaatatttcagtaatctacaaaatccattgtgtacaaaaatccagtaaacggagcaaatatcaaatagccattccaagcaaaaagaactgttataaagtttggccaaatttaactggtcaaaaaccaattgacattttttatatatacttccagcatggcccggtttcatagcacaaaacaaacttcacattgcaaaatttccattggataatttttcagacaagcaccagtcaaagcaaccacagattatacatctcagatcatgagaccacgcaaacagacggctggacaatcaacaaccaacaagcatcaaagcatttcgcagaagaaccgaaacagcatccaaaatggggtcttgaattctacagttgtgccgaagaatcactgatctcaagggatgattctggggactctcatgccaaatccgcgcttcattttctcgacgctgtttacagagatcagttgtaagtagaacttcgaagtaagaaacagagggtggttcacttcaaagaaataaataacttgaggtagcattgcatataaaatgcacaagaaaggccccaacgtcacgaaacatttcctgataatattaagttatataaccatatagatttagattgcatctttctcgatgttcccagctcaacgatcgatatttggcacattttgcatctctatgttaacccatgaaagtaatcatcagcaataggagctttcttagaggtggcaatatttctctattaaaaatgatatgcctgtttgtctttattcgatgactttaagatctttcaatagcaagtactaaaatggggaacggcatgtttcactttgtccgctaccacattacaaaactatacgaacatgacttctctttccatggtttataggccttcttgtttctaagttacactatagcagataagctagtgacaaaaacccaaaacatgcaatggtataatacattcaccagccaagcaaatactcagaagaaatgaattttctgacagcagctctacaatgattgaaacagtgattactaaatgcgcattagaattttgaagtacaatggcattatttgatgttgttaagttacttacgttggtgcaagtttgccgagacaatacagctcctcaccagagacttcatccgacactttaccggacatctcaactctgtatgatctaccgggagaatctgggagtcctcgacccacaagtaaatccaaatccttctggtgaagttctctcccattaacaaatacacctgtatttccagcagcgcatttcttgggcataggataattgagttctggaatatatggctgcagcatagacattcagccaaaaactttgatcaaaacatatcagggtaagacaaacatatcagctacactgtaattgctcttaccggtatcatgccgaggcaagactgtcccattacaccccagaaaccagcacggtaatcatacctaaacaataggacataagaacaaaatgtcattgccaatggtgctgacagtatttagtaatatttaaaactaaaatatgtctaaactgatcggaggcaaacagaagttgcaggcttaccagtattcaccaggatagattggtccagctatcttctcagccttcctgaccgcccgatcagagatgggatagccattaatgaaaacctttgctctgccattgcccattccgttgttaattttgaagctcttctttatgagattggtgaaaaatgaatcacccgttttcacggcccgagggtgatctacaggttgtgccacatcacctcgatcttgcatgtagtcaggatcatcatactcatcatccgacaagtccattatgttcactactgatacatcttttacagtgttctgcttgaaactttctgtcaacacagccttctcatgttcagatcgagtacttctgcttcctttccctgatccatcaactaccttctcagatggcgagtatccaaaatgatcacgaagatgtaaacttggaacacgggtagacacctcagcttcaggatgaagatccctagacccaggggtgtccctctgggaattagatctcgcagggctgttctcatcttcagaaatgctgcaagaagacgatatcccttgcattttttcagcttcacttgagttcgagggtaggtcttgagaaccatgacttgctgcagaaaaactataaagtggaagcaccctctcatgtggagcagaattcgcattgcttccttggccatcattggaactaattttgctgccgccagatatgtgtgaaataggtgaaggtgctgaaacatcaagcctgcttccatcaagcttgaccacaagcgcatgtgagcatgacccgcaacgtaatttgtactcatccttccctggcacgggggatttcttcggaagttgcagtacttcatagcagttgtagcatatagtgaatggggcaccacatgcaatcggttcacaagtctgtgcaggttttttactcatagcggccctcatgtgattgcgctgcattgaagcgttgactcttgaattgtaattctgtgtgccaaacattgcaggaccatcaaccgggtaaactctaggattattcataacatacggtggtaccctgcgatggttgaaacccagaggaggcccctgaacaggtaagaactcacggtggtagcaatgtagacaagaacaggcaggctgatggtagaagccatcatggtggtaagagatcagagggtcaggatcatactgtccataaaaataattatcaaaatttctccatggatatgtgccaacaggatagcttggagcccccatgtgtgccattggctccccgtatccatgaagatcttgctgagcagttcctggagcataagcttgcggaatgcaaggagcttgcccattcaaggatggtgactgctgagaaccactccgctgcaactgaggtgaaccatgtcgtaaccgactcaaccgctcacgaggattatataaccctgaggcatccaccgctttatctgtagaagtacttccacttggcttgttggtgatctcacaggatctctgcacctgatccctcagctcatcaagcatccgtaacagatcagcacggtctttttcaagaccattgactctgtttaggccctccaaatttctcatatcagcttgctcaccattggtatgtctgaatcttgacttaatatggtagtcagacgggccttctgcaggatatgcattcggagggatggcatcaacaactgatcttggcgatctgtctctggctctcactgtgtgttttgcttctcctttgtcctcactgcggatgcgccggtacttggcctcccgaatttccctgctgtcatctctaagtgaagcctcaagcttcaaggcatttggttctcttggaattcggctatcatcacaagctgccattctgtcaagaagtacctgtctctcttctgctttagcttctccatttttggcttctccttcttgggcagcctcacaagtgtctttagatgcagctcctttgttatctggtgaactctccagcacttcaaggtacttcacatgtccaccatcagatttctctgaggaattctcagatgctgagttcttctttgctgcaaaatggaccataaatgcagtaaaatattactttcggatattgcaactttaatgtaaattttgactaaatatgcagattgaaaagatttcaaaaaacccttgaaagatagagagaatttaatgcaactgattctgtagactatctgtacaaaaaaaaagtagactttcaagtacacacttaattcttgcatgacatcaatcctacggatgagcagctaatacgaaaatgcacttgataatataacatgagaactgaatgaaaaatagcaccaagtgaattgttcaaaataattactagctaaattccatttcatattttaaaagggcttacaactttaactgaaaaaaaaacaaacattagggccgggaaaattcaacatgtttcagcgtttaaaatttggggacaacaaacccccccccaaaaaaaaaaaggagacaaattcccagaatgattagttaaatttcaccacgaaggatgtgttataatctcattggcgtcaaccgacagaaatgcatgattctcaagtaaccaaaccagcatgttaatgcagggtaaaataaagctttcatgtagagtaaatagaattttcgaaaaaaaattgttttgtgaagctagcccgttgcataaacccactaatactccgtatcaaacattattaaccagttgggaagagcttacaaacacatgaacattctcgtccggaccgaaacacaaaaataaataaacaaattcgccccacaagataactgggctttgaagccacggcctgaaaataaataagtaaattaaacgtagggatgcaaagctactgctactactactactagtagtaccaaacatgctcttgtacatgcatcgattgcgtcaaacaatgctaatcaaatcaagcacacaacaagggaagaaaacccaatgcaaagccaataggagagcgagcagaaccgccgaaatggctgaagccaaagaggcgcgctaaaaaaaaagaaatggaacctttaccgtgtggaagcaaacaaaattgagtctcaaactccgcgtgcatatatatataccaaaacaaagcaagaaaatcgatggcgaacaacctgatttcatcacgaaccttcagtgacaaaaaaaaataatacaaacatttcaccacatcaacagttaattaatcagggcacccacaatggttatgtataggctctctataagagatccatgtcagtatattttcctacttggaagagattaaatggagagagagagagcaaagctatctactaacctggagatagtctatagagaaaaacgagacaatgtattagagagttatagatacccatgtagacatactattgagatggtttactattaatctagtctagatagcaccttattttaccattgcgggtgctctcaaaggagagaaacaaaccgaaaagcgagatcaatggcgaatgagaagggaacagttaggtgcaacgcgaagaacagagagagagagagagagagggaggggaaagaagagaagggaggaggaccttggagagtggcgccgcatccgccgcagacgtagacggagtagttggggagctccggcaagaacttctcgcacttggggcaccgcaccacccgtatctgctgctgccgccgctgcccctcctccccctccatatctcccaatgcctccataccgccggtgccgtttgcctgcccccaagaacggcgagcaacggtggccagcccaaacaacacggagacgccgacgccacaaccaagaaccaagaagagagtcggccgggcaaatgcaaagcttcccctcttgccttgattcttgggggtttcgccctcgccgccttttgtctttgccgctctcactctctcaccgattctctttgctacagtactctctctctctctctccgtcactgtcgcaactcgcaagcaaagaaaagagcaaaggaaggaaaggaaaaagaaagggaaattgctgctggcgatggtggtgcagaagaagaatagagatggttagtttattatgggggggagaggaggaggatcaaccacacggtacttgttcaggcagctcaaccacactctgcttttatggtatccgggcttgtttttcttgggtagctaggtcggccgtacgaaggcatcgtgttgttgtgctctctctttgctccaaaggtggtcgtccaccttggaccaaactatgcacagcatatgcatctcatcaggtcgagtattcctcattatatactaactaggagggtagcccgcgcgaatgcgtgggcatgtattatacacaagattaaacttttggtctgaaattttaaacaaaatttagttgaatttaaacaaatattaccaaaattcatgaaaaaaattcggctgaaataatatcgtatcggaggggtccgaaatgaccaaaatttccaaccatgattgtacattgcatttgaaatatatatatatatatatatatatatatatatatatatatatatatatatatatatatatatatatataacagaatatcaatcggctgacacctcccatgtttaaaagtttgaataagacacatcaggtgaagcctccgctggtcttcggcatttttcttcgatattttttccaagatatttgttaggtttaaaatatatcatatttattacatatgtataaataattatctatgatctctttattatataaaaggaagttcgatttagtttgtttggaaaacatgtctaacaaatcaagtgtaaattagaagtaagttgtttggccccttttttaatagaatttttacttgtttttttacaaattctaaagaactatattgttaataaatatgttttatttgtaccatcaagtagttctccttctagtaggtttaagttgatgcaagttgttgcaagttgttacatacttacatataaattaataaagacatgtcatatttctcgctaccttctgatttgtgcgatctatactatctttttttaaaagaatatacctagttaacatgaatctaaaattttaaatttaatagtaacaaatataagttttcaaagaactatatattgcgaaccttagtgcggtttatatatgtaataatatgtggagaaatataggataggtgtaaggccattaatgaataagcgttttaaaattgttatgaaaatggaatatgcaatggttggtcaaattttagtgaaatgtaagaacccaattttttacgaacttattacattttctattacctgctttattttaaattttataccagttcaaaatataggctttttggatctttaaatcattgctttaattataaatacaacaatatttaggttagaaatcagatgcatagcttgaaatttatgcatgttttaatatttttgattacttttggctatataaacaggaaggggtagagtagagagctcaagccgagaagggatgtgacgagtagtgtcgtgttgtgcttatgttttgggggagggcgaagtgaaggggtgtttttttcttttatatctaaatgatttaagtaaaaccgatgatctatttttttctcaatttttttgttattttttctaatttttaagacgtgacacattgcggcttaagattttctaaaaagtatatatattggttgaaaataatggatctacctatttaagtgaaaactaatggtcagattatttttcttccaatttgtaaggttttattcttatttaaggcttaacacgtgacgccttaagtgtgctcagaggatgtacaataatttataataatataatacttattttcattttatattatggtctgtcttttttctatttggttaccatgcaaaggaacagtgtctatgtttaaatcatgtattttcatttttatagagtgaaatatgggtaacatggatcttaaattatctatttaattataaataaagcaaaaattcaaatagctaacattatgatttaacttaagaattataaccatttggctttctaattattgatatttttttacttaattaagaattaggagacaaagaaattaaatgagtgaggagaggaagagagagttgaagggaagagattgcgcgtgcatataattgtaataattatttttaccgggttgtagtgttttagttgcagttacttttttaactaaaaattgaaaaaagatatattgattgattaaaatatatcctttttacttgtcttttccagtatattcatagtagctattaaaaatacgaatactacaatctaataataatgttattttgacttattctaatgttataatgggggagtagctttttaaagcattccttagagttaggtttattttacttttttctatatagatctaatttaattattccaaagaaatatatggtgataaaatctataccattatctttctataattttatgattgttcaaatggcacacaaaaaataagaaaatatagccccaaagtgacatatttcttctcaaagtcgatattacagtggatatgggtctttaaatgtaaaataatctaaagacataagttcatgaaatattagttgtgtgagttaaatgttataatttcttattttttgcataagttttgctttctaactaacatattttggaaacattactcatagtatattcattttacttttatgattgtagacctaatttaattattatgaagttatgtatgatgataaaatctatattattatcattattttatatgtttttataattgcttgaatggcatgcaaaagtcaggaaatctaaaccaaaatggcattttttttgaaagctaaattgtagtgaaatatggtcttcaactataaatttagttataaataatctaaagatttacgtggatcagaaattagttgtatgatttagaagcttaattgtttaacacaaaattattgtttatctaactaataaggcatgaaaataggagaaggaataggtgaaaagtggagaaatgaattgaaggaagaggaggcgtacatacgtacgtttgtttttgtcaaaaaagtaacttatacatacaggcttaggtgggcctgggtttagaagaggaattttttctagaaaattaatctaattgttgtaaataatgggtccaccaaatttaatgaaaatatgttttgttattttagaatttttaagaatttcactaatttattagagtatcacatggcaacttagaagcgtttataggatgtcgtatggtgaattaggagcattttttggaagtttaatggacttttagacatctaacctaatgttctaaaatattaatcgggtccaccaatttaaatgaaaatcgatggtgatatttatgtaaatttatagagtaatatgttttatcattaaataatattaaatcctattttaaatatcatcaatttttttccaatgatactaagtatggatgtttttatataagccaacaaatcatcgaagtagaagtaatcggttggaacaaatttatttcatttgcgcatatttgtttgtttcttttgcaatgtatttaatttcaaatacgacagcaataatacaaatttttttatcaagagtaggttttctcatgtggttccaataagttaattttgtattatctgatctcttgatttaagcaaattaaaaacataattgatgtttaacagaaatattttggattggcctattatttttttcaatccaaatctgcttattaaatgttaatcagatatattatataatactctaatagcatcgtagggtttcatctagttcttcttcacaatatagtagcttaatagttataatcgaattgaagcgtctcacaccaagccaccatgacattccttgcagccacatgcgagctacttggcccgcgttcatcattgttcacgtacagacggacagacggacgtacgtaagtacgtaggaggtggtggggctaggggagaggtgggattcaaatttaatctaatgttctaaaatatcgggtccaccaatttaagtaaaaatggacggttagatttgatagagccacgtggcggcctaagaacattcgtaggagcactacgtggcggcttgagagcgtttgtaggaagtttaatggacttttagtacataataatagatagatagatagattatatacttccttcgtttcacaatgtaagactttctagcattgtccaccttcatatagatgctaatgaatctatatatataataatgtctagattaattagcatctatatgaatgtgggcaatgctgaaaagtcttacattgtgaaacggagggagtagaagtactagtactctactccctccgtcttcaaatataattatttttagacttcgacacggtattcgagatactacattgaccaacaatatctacaaaagtgagatgttatagaactctataaaagaactgttagacccgtccgcgttgctctccccagggtgacacggacggtgaccagcgcccgccgccgccaccctcctcccttctctcccccgcctcgccgtcgcctgagcggctgccagcaaagatggcggccgttaggacagcggcggcgaggcttcttctccctcggcggcgttggatggctggggaccaagccgcgtcccggaggtggagtcgtcgccgcgccgcccagatccgggcctccatggctggatccggacggggagaggctagcgagcgccggtggaggcgctggcgaggcggtaggcagcgggggaggcgaggacctgacggcggcggtggaagtggagaaggaaaggcgacgaggagaacacggtggtggggtcgtcgcggcggctgccggcggatctggcgactggcgtcctactggccagatccggcgccctcttctggcgagggaggccatctccccgtgtgccagcgagaagaggagctccggctcggcatgcgatgaaggggcaggcggcggaggtggccctcggcgacggcgtcaggcatagggagtccagcctgtgaggctcgcgtctacggcagtgagtggcaccggaggcagtgagaaggaggatgtgtggaggtgcagcggtgctcgaggtgtagggggaggctggacgatgaagggcgacagaggtaggccggcgcggcacgagaggcgccggcggcaacgaggtcggtgcggcgtgcgatgcgatgggcagaggcatgagcaagtgcgtccatggccggcggggcacgcccagcgcggccagtggctaactggctttgggagctaaagggatggtgtggtggtccggcaatggtcgttgcgtaggatggttgtatggagctttgactggaatcgctggcgaaagccttgccaggccatgggccggcatgacgacgacacgccattaggcgccgttccccttcttgaaggtgttgttctggtgttgacctctcctagcaccaagaacctttcccatgcaatgctagtcattggtgaactcctgcattggctctgaagctctacaagcctaaggtgtttgatgagatcttctctgtcttggttctgtttcttgctctacggtgggtgttcaacattcttatttggttactgctgggtagagtcggagctgcttcgctgtaggggtgcgacgaagctcggcaacaatgacacactgcaatctctttataaggttgttgatgctagctgtgtgtacgaagttgttctttggttgtttaggcttatgtccttcataggtatcgtttatgcttgttcttttggtgttatggtagcatcgcagtgaagtcgaagctgttgtgtcgcttgggcggcaagctcggtaacgataacatgtgtgggctgttgtgtcgtcactatgataagcttggccgatgccttgtgtcgggctccgtcgtggtagtttaggttagattagttgttagtgtggtgttgtagttgtggttttcgttcagtttcccctaattaactggacaatataaggtttggtcccgtttgcttcttaaaatgagacaccttcttcttaatgtaaaacatcggcaacggtctgaccgtttaaaaaatacaaaagtgagatgttttactgcttggtcctgttcgaatctagaattaagtataagacatataaaatgataaagctattagcgtatgattatttgagttgttacaaacttagaaaatagatttgctcgatattttaaaacaccttctaaaataaagatttcataagaaatatatcatttaacaatttaaaaaacgtgctaatggaaacggagtactctataagaattgtaattcagaagctataaaaggattataaaaggatatgttgtacgtaggtatggctcgttaagaattaggccacgtttagattcaaaattttttcttcaaacttttaacttttctatcacatcaactgcttggacacatgcatggagtattaaatgtggacaaaaaaaaacaattgcacagtttgcatgtaaatcgtgagatgaatcttttgagcctaattacaccatgatttgacaatatggtgctacagtaaatatttgctaatgatgaattaattaggcttaatagatccatctcgcagtttacaggcataatctataatttgttttgttattagtctacgtttaatagttcaaatatgtgtccgtatacttaaaaaaatattggcacacgaactaaacacaaccttaatgcaggaattttacaagactgttagagaaataaaaaaaactgggggaaaattttctcgtgtttcaaacgaggcttgaatttgattgggctagctagctagcgtaaattaatgtgtccctcctaatattggcatgtaccaaaaactataataaacgcaaccagtctaaaactgtgtgtgatgtcaacaacatgcattttaggacgacggacgtcgaaaatcaattattagcatgtacatactgtacgtacaactgtgcttcatttctctcatagtactgtttatatatctactcttgcgaactactcctactactatatatacttataacatcagcaatgtgctataaataaatactagtcctccatatataaatgcataatgatgcatatccagatacatgagcagtcctcgcaaggcacaaacagtgcactatcacgtcgtgttgcaaactactactcctgctagtatcaggccattcacagtgggtttacgtgtcattcagctttgagcttacacgtatgagattctcagccacatcatcatttcccgtgaccaacccaggaccgagtggccaatgtgagacacgttcttcagcaaaaatttggtagctttgtcaggtcgccagggaagggagatagggaggaaaggaagctcggcacattcgaagtttgaggctgaaggcgaggaggggagcttgaggctgacgccggccatggccgcccccttttcacgtgccgagattctcctgtcgcgccgtcccccgtcgattggaggacagatggcgtcgtcgtccccaccgctgttgagcttgtcgtcctcgtgtcgtcgagcttgtcgttctcaagccgcccgtcgccgtcactgcccgaggccaagtccggccggatctagccatccgtcccgccaccgctcggccctgccgtcgtcccgctgccatgccgcgcccggcgcccgacgccgtcgccgcttggctcgccgccgctccgcccggctgccccgccgccgcttgggccgctcggcgtcatcgccccgccgctccgctaggccacctctctgcccggctgccccgccgccgcttgagatgctcgggagagagagaggagagagagatgagggaaagtgaaaaggaaaaagtggtatggtgggtctcactataagttacttgtaaaatcacttgcattgtagataagtggcttttggtgttttctagctgagcctcaaacccagatgtaccatttctgatggcgcactgtgagtgctctcacagtggcttgtgaagcttgtgagttgtgatggaacaattggaggttgcggttggtgaaatgggttggccgcaattaaggcgcgcggacatttaggggatgggggcggtacacgagacaaattaaacaaaatcttggcgtggcaaagctcgacacgtggatgcaaatggaaatggacggcccggatcgtcaccgatggcagcagagttttttttttttttttgacacgagcagcgtttgttaccagcaaccactgcaacgcgtaaacgaggccgcacccgcacgcccatctggtttttggcgggcgaatttatgacgcacaaaccttaccaaccagtggggataaattgtacccaggtcctcccactttccactatttttatggtccctatggaacagtttggagaatatatatgtaggggtactattatgtaacaggtaggcctcagtgcaaatttgctatacgcttgtttggccgattggctcattgccgttagcatttttttttggcacagcaaaaattggtcattaccaaatttttagcaagaattgacaatggcttcgtttgatttgctgccaaattagttatatatgtcggctcaatctttccaagatgctcataagaataggtgtatgtgcacacaagtcttatcgtgtacgcaactaaaaatctagaaaaaaaattatagaagtgatttcaatagtattacacttatctgcgaaagggcctgtagcctagtggttacaagagactcagtagaggtcttgggttcgactccccatgggagcgaattttccaggattaaatggcgttgtgctttcagtggtaggcgacatacccgtcgacagcgaggcgcctgtggtgacttcgtcaatctctccaggatttgccggtccagtcttcgaagatgctcataggggtagggtttgcgtgcgttctgagtgtctgcattgtactgtgtaattctagggtttgcgtgtgttgtgagtgtctgcgttgtactgtgtaattctcaaaaaaaaatagtattacacttatctgtccaatgttaacctcaaattcattatattttagctgtaacaaaaatgataaaaaaattttaacagttttaagagtataaatctgtcaaaatagtgtcgttttttttgctccctactctctctgttttatattataagtcgtttgacctttttcttcgtcacattgcttgaggtttgatcaaattattgaaaaaaatagcaacatttataacatcaaattagtttcattaaatttaatattgcatatatgttgatgatatgtttgttttacgttggaaatgttactatatttttttacaaattttgatgaatttaaaaaagtttgactatgaaaaagtcaaacgacttataacatgaaacaaatggtatatataatgagtttgaagatgagactctatacatagatataatactactaagtatatatgtacaacatttttagaacttttttgatattatttagttgatgtgcatgatgtgtatacgagaaaacttgtgtgcatatgatcgatacattgccgtgtgtattacaggtgtttagagcttgtttatactgtctttctaaaaaaagttacattttggcatttacttaagctaaataatttggcgtgccaatttgactataaaaacaacccaatgactaaaattttggtgatgccatttttttatttgatcgtgtttggcatatgaaacaattaattaaagaggccctacaatcccataacaattggttttgttccctcctgaccagggaatcgatcataataaatgaagcgggacgtacagacaagcaatttttcgcgtctcaattaatctccctttcacagcaagcaagcatgtgcaaattacctgtaattggctggactatgtgattggactactcaatttaagtgcgattaatttcactacaactctacaagtggttcatgctcgatcatggccaatttcatgagacaagctgcatgcatgctgctggtaacgacatgtatgatagttctaccttggttgctaacttaaagatatatactagtactcaattgctaatttggcatgtgacaagatgattaggttgtgtaattgtatccctaggttatcatgattcaaaatctagagtagatatcggtgtcagtgcactcacaaacatcatgtttagctagataactatgtggtttaactaactggagttaaaattgtttaggttggatgtagatgccaaacaaactgtatttctaccaaaatgcaattccttttttcacatgagtatctttatgtcggtctacgtatagtattataccatcaaatttatcactgttatagtttgtgttgaatatatatacaaaatcagttacaaattagattttttagttgtaacaatatatgttagaatagaattagagtcaaatattatcttagactctctcttaaatagagatgtacacatgttgtaacaacatgcatggcaactatagcatagggaagggaaattgaccggctgcctaaccggtcgatcgtcatggctaccctaatacattgtaattatactagatcgaggaggagagtccataattaggcaaatataatgtcttggttttgtcgtcatgattcgatctcttgtggaatttttatatttcgattatacccaccacctgtgaaaatcaatttccacacgtggggcttgactggataacccacacatattttcataggcgggtcttcctagccccttgtaaaaataaggggttgtcttaaaaaaaaccatttctatatatagtagtgacttttggtaagccataaaatctaactcacacttttttttattcccacttgtcatagacccacacttttttttactaaagtttgcctaacatatgtaaataattaattcttatcaataaaacttgtggcatgtcgtcacaatttatatatgtcaaaaagttcggtaaggtgaagtcgtatatacaaccaaacagccccacgtctggcgctagtacatgcatgcgtggactctaagcattattcagcacgcatacatctaatacacatgtacataaccacaaccattaatataaataatgtagggttgatgcatgtcatgcaaccatcatgtatatgcatggttggtgatctgaaagactgaaattaaagtaactctggttaattagattagtacatataggagtatttgcagcttaattaagctccaggtttggcctttggcgcgcgcttatagctaattactcctaattaagctagctccaagatcgatcgatcgatcgagatcgatggttagatcgacaatgtagcgtgcgcaagggcgggacagcgtgtgcccggagaagaaggcagcacggcagttagctataagctgcatatgcaggcaagcaggcatgtgtttcagccaaaatcatcatctcctgcacagctttacattggagtcatgctgcatatatgcaacatacatattcattgtgtttgtgctcgatccgatcgatcgatcgatggagatgatcatcatatatatacatgcatatcgagctgcatgtgcaggcaaacggcgtcatccgtatatatggaccgcacacagatcgatcggccgacgacgccaatcgtactagttgttaattgagcgtacataatcacccttgggagtatgtaaataaacctcactaaactatcaaactatgataattgatcttattgggcccctttgaatcccaggattgagaaaacgtaggaatagaaaaaacgtatgattttgataggaatgcaaatgtaaaacagagtattgtaaaaacacaggaaaaacataggaatgaccgtttgattgaaccgtaggaaaaacgcaggacttggatgagagagatagactcaaaggaaagttatcaagaagttgaagcccttgctaaattttctccaaaatctctataggattatctattctataggaatttcaaaggattggatatgatccaatcctttatttttcaaatggcttcttagtaaattttcctataagacagaaatcttccaaaattcctatatttttcttcaaattaaaggggccctaaaattgttggttctatcacagctggtggagaacgttatgctgatccaaaccaactgtgataagaaaagaacaccagctagaatttccagtcaaaatgatccctccctaactggaattctaaaggcagggcactagataaaaaagagaggggaaaaaaaaggaaagttttgaaggctagtctaattaagaaacacaaaaaagaaaaagaaatggaggtcaaagggggaaaagaaaagagaaacgaactaaaggagataatggatgaaataattaaaagtggagtgatcggttgcgatcgatgagacctgtttttgccttttgatcctttttttctgctaggcgagcaaagccaaaggaaggaaaagaaatatgccaggttgaccgggcggtggccaagtggccaactgcaggaagagcacccgcactagcactacatatgcagtaataaaaaaaataaattcaattactagtatttttttaaaaaaaaactagtaattgagttactaggttcaaatttagatatcgtccgtgcttaaatctatagttattcattcgtttcaaaatgtagcattagtatgactacgaatccggatataggttgctagccggtacacgaggtaagaaatttattgtaccgataataaatttatagtcgaaagttttttttttaatggccagtatacatggtaggagagtgctctcgtgatcctgttacattacggatgaggctcgtctgacttattattctctaacgtggatcgctgacatatgaacccataagcggtgggatctatgtgtcaaccatttaaaattagaaaacagtactaagttagatgacctattttcagtacagtacgccacagcacattactaggaatagtacattacgtacgttgtcatggtgaccatgcacgagggagaagtgagaaggaggagatgggcagccatggcgtcgcttttgttttgttttcttttcttttcaagccgtcacacaaaaaggagatggagtacgtactgtatagcaggtgtacagtagtacgaatcctaggtggatctcgactttattcttcttggtcgtcctctgcattgcgatgcatttcttgccacaggtaggtcacctcgccaacgtcttcctctctcttctttttcgtctccaaagacgagaccaaggcaagcagcagcagtagcagcagcagcagcagcagcagcatatgcacgcatgatgatgccgcacacaactgggcccatatatgtgctccacttgggtacaggatgtgcgtgttgatcgccccaagtttaattaaactaggaaggtagcgtgaatgcgtatgtattgtgggctgcatgtttaatattaatcggatagcactgtcatacttcaaagtatattttctccacaaatattcttcgtcggtatttgttattttccacaaatgtgttatctaactacttaaaagtgttttacattgttgtaatgtaagcaacatgttgttaataatatgatttaaaattctttgtggcttttcctaaatatttatgactgatcaatagctagtctccaaaatatggtctaaaaatgcttacattttaggacgaaggtagtagttaatttggattcgactcatgaaagttaactgcaaataatctaatgaggtgcacagataaaaaaattagtttaggtggtatagttgtttaaaaattgctatcacaaaatatgttttctatctaactaataagcataaaaataagacaatgggagagaaggaaaagatgaggcgaggttgtgtcgtgcatgaggggggagggcgcagacatgcatatgtatggacataatgtaataggacaggagggttgggattgggccttttctctttttgtctatttattaagataaatctaatggtaaaaaaataatgattccatggtaaaaggcatatttcatataaattatgagtgcatgtgattttttttcaattatttcatattctattatgtcaattcggatgacatgtaaaaaaaaagcagggatgctgtctcttgacaaaacactatttaatagttgaatttctaatttttgtttgacattgtaatttaaatttacatatgcaagtttctagaataatgtagatgagaggaaggaggaggaaggggaggagacgttttttatttaaaagttttatatagatagattttatggttaaaaataataggtttatctatttaaatgaaaatcattgattaaatgtttctttcgcagcatttatagtactttttataatttattagatgtgccatgtgatgagctaaaaacactataaaggatgtataatagaaatatctgcatgatattttatggggatctgcttaacaaatctttattatataataaaaattatatattaattatttatatactaagctgctagctagaaataaggataataaagtgaaggagagatggtagatcatttacgattgcatgatatgtcttaatatttagttatcatataaaggatatgagtttatatgcaaatgatatatttcttttatatatatatacatatacatatatatatacatatacatatacatatacatatatatatatatacatatatatatacatatacatatatatatatatatatatatatatatatatatatatatatatatatatatatatatatatatatatatatataaaacactccaacacatggcataattaaaatcaaatatattataagaaattctaattatttaatattaatattttaacataaaaatttgctacctataaataaatggaaagaaagagagagaaggtgggggacgtacgtacgttatgtacgtgatggaggggatacggatgggttttgtgattttttttttcctgttataagatagatatctaatggtgtgaaacaatgggtccaccgtattaagtgaaaatcgatggtcggatttttattgttttcttagaatttctataatttgttagagcgccacatggcggtataggagtgtttgtaggagccacatggcggtttaggagtgtttgtaggaagtttaatggacttttagtatataatagaaatagaaatagaagatctgcccagattattgggttaattaacctgctactaccgttttcttggatcagatgttcctcgagctacaacgtcgccgggttttgcagcttactacaattagtccttcctccgattatgccattctactacctgattagcatcttattcaaattttttataagagcgaatttttagattagtctgtttaaggggtaagggtgtgtttagttggggaaaagaaaatttttggatgtcacattgaacgtttgaccggatgtcggaaggggttttcgtacacgaatgaaaaaactaatttcagaactcgtcggtaaaccgcgagacgaatcttatgagactaattaagccgtcattagcacatgtgggttactatagtaattatgggtaatcacagactaattaggcttaaaagattcgtctcgcgatttcccccataactgtgcaattagtttttctttttatctatatttaatgcttcatacatgtgtccaaagattagatgtgatgtttttaggaaaaaattttgggaactaaacgggccctaagtagcctaaaatcatttattttatgttgaataacagtactagtagcatcaactgtcggacgtacttacatgaatgatttttttacattttagactttttgaaaaacttcttttataaatagacttataaatgaatttttgtagggcatcaagttattgacgccatgatccctagcttgcccgtagaagctaaaatgctgatgtaaaagggatcggtgcacacgttattggtgccgatgatctttttgtaaattcttttaaaaaataacttatttgtaataaaagaggatctatttaattaaaaatgcatttacaaatagattcacgacactaataacacggcactgagaatctatttataaatatatgtattgtaaataggtcttttttataaaaaataattatagataggttcttgatgccaatgacattgacgctaactccttcatatcagtcacttagctttcacgtgaaggctataggataatgtcaatgtgattagcactgtcacgttggaccaagatgcctatcttcgttggcaccctgaaaagagtctatttttaaaataagtttttctaaatatttatttgtaaaatgagtttcagagcaaggacaaaaagtaaaaaacaaaaaaaaaatctagatggactggtccagtgaagaagatggctccccaatccgagctgccatgtgtggatctgcaacgcaaagagtaggctggctgtagctgtaactagctgcacacagcagagtacaggacacatcatattacctctgcaggctggactactgccgctgcacaggctagtatagcggagaggggttacgtctaatcggggtcgctgaaatttgttgtttgtcatgcatactccatggatacacgagtcgcagttgtctactccagccagtgtaccgtgtgtatatggactggagactggaatctggactgcttgtgtgtaccgtgtgtataacggaggatcgatcggtcattgtgtcacggcaaatcctgcttcaccaaagatcttctgctgctgctgcttctctactcacaagatcaatccatatcgtccccgttaaaaaaaacattaaacaagtggtactactagtaaacattagaaagagtgggatcatttggtttggtgtcctagcaaatacctttggtaaattttggcatcaatccaaatatctacaatgtactatttaaagtgctttgtagggcaaattttgtcatcaaaccaaaacagcccagtacaaccaatatcatgttgttcttgcttactaaccccgttccatgaaaaatcaatctagtaatggatgtgataaattctagtactaaatcacacatctgttaatatgtcacatccagttctagattatgttttatgggacgaaggaagtatttgtccctcacataaaaaaaatcaattcagatactccctctctcccattttaagtgcaaccatgagtttttgtgcctaactttaatcgtccgtcttatttgaaaattttttataattaatatttttgttgttatgagatgataaaatattaatagtactttatgcgtgatttatgtttttaatatttttttaaaatttttaaataagacagacgattaaagttgagcacagaaaagtatggcggcacttaaaatgggacggagggagtaagatacaacatattcccttccaaaaaaaacaactttcatggatcaattcgaataagcatttttccagatttatccttggaagtttattttttttatattgattgtttatgtccttgaacatgagcaatcaaacttgtctttttttttcatattgtagtatttttagtaaacatatttttaaaaatagacttaaaaaaacttattgcagatcctatctctacggcatggtttgtggattttggcgccagcaagtttggcgtctacctctcccatctagatttcctcaaaatcttattactaatttgctactccgtatcaaattttaggaaaactacaaaccaatgcatcctaattcattcacgctaatttataaagggaggagaatgtgggtcccacactccttctcacacctagtaatattgatttgcagtgaaatttcggggaaaaaaaatacatatcatgtgtcagatttcgattttatttcaaatttaaccacgaatcaatagtactggagaggagggtgcgagccatgtcctcttcccatattaattttttatacataaaaataaactagcggaaataaattaggaatttacgatacattaatatatatcgtccttttttttcaaatttgacaacaagtctataaaatttgcagaaaaaaggagtagttcttaaatgggagaggacgacgttaaaatgttgctctgtgatatcctacctcagcgccaacatctctggtgccaagatagtgggtccatacctgcaataagttttatagagggtatatttgtaaaatattttttctagctaaaagaactaaaatgcagccaaatacattatactatattcaataaaaagtactgtcggcccattctggaataactatcgctgtcgacgacggacaataactttgaccataaattacttctaaatgaatgtattacgatcaaatgaagtatgtacaatctatctatctattatatactaaaagtctattaaatttcctataaacgctcctaaaacgtcacatagcacccctaaaaacactcctaaatcaccacgtggcgctctaataaattttagaatccgatggacccattagttctaaccattaaatctattataaaaatacaattaaatttatctaaaaactcttattgtacgtgcacatataggtattccaaaaaaacaaaaagtacgtccatattttgatacgtacgtacgacgctgggcccacatcattctttttttttctatctcacttattatggaaaaccaaactgtctatatttactatgcaaaatatatgttatttagagtttctaattaggcgcatttcatggaaacatccatgaaaaatataaataaaataaaaaatagattatatgatagctaaattaggctttcatttttaaaataaaaacaactctaattgtgactaacaattctaaaaatttttccactccctaggtaaaatataataatatgtcaaaatgatattactaaattatcatgaacgtattttcaagtattatatgttttctctattctataatatttgaaaattaaagatcttatatattcttttgacaccatgtcgatgtcttctatctccaacttaattagactttgatctagctcaatagctgagcttatcttggacacacgaaacgacacatgtcattagtgcaagattaattaaatattaaatattatgaagccaaaaatagatttagcttttatatagaatatatttctaataatacacacgttgcacttaaatatatacaatgtagtccatgatatcaatttaattataaggaatataatggtttagatggacttagatattgttatcaaaaggtattaatttcttttataaaaattcctagaacaatcgaggaaacgtgctcataataaataagagagtagccaatccgataagtactttacaacttattgcatacatactaaaacccttaatatgtagtatataatatactttataaatacaaaatagtctaatacaatcgtatattcccactaatcataagtatataagttctgtattagtgggaatattgcttacgagtcattcgtgcacagtgcacctaataattagctgatatccaataagcacgtgtgtcatcaagcaccgaagataggactatactaagtgggcaacttcaacaaatgataggtaagaagagtatgccactaaaccacaacaaacaatagttgacagtgagtaggttgccagtgtgagtaataacatttctacactcctacaagcactcttaagatgccacgtgacaactctaataaattagaaaaaaataagaaaaattattagaaaacaaaatatttggcaattgatatacacatagctccattattttcaaccattacattagatctattccaactaaaaaccatttaatcccttcgtatgtacgtatgtacacaagatatgtaaaaaagaataaaaaagaagagttcatatacgatctgctctatctgatagttttttttctttaatttgaggcactcatggcaatcttctcgaagaagtcgtgtcgctgtggcaccgcttcatgccatcccaccagacattttgaaagtatttttttactaaccatgtaaaaggcaatcgtaagcgctcatataaatgtgtgcacactatcctatgaatacacatactactattcacaaaaagaaaatatacatacttacaataaaaaaatgtcacatggaaacatattatatccttatgtaattatgccattctcatataaaaagtgttaacaaaattagcataaataattttgacaatggattattccttcgtatattacccatgaacatgcgcaggtgacttagatgtatagtaaaagaaaaaaacaaaactcatattaactcgtatgtttgtgaaagatggtgatagacgagtttacgtataaccaggataaagtgaatttgtttgaatataatatacattatcatttagtatataaaattttatggtttatttcatggtgtaagtatttctttcttttatgattataatgtaatttatagttcttacagttgaatatggtgagatacgattttttatattcttttttataaacaacaaataaattacccgtgcatcggtacgggtttccttgctagttttgtttaaaaggcatgtggttaaagtatgaacttggaatagtgaccgtgtcaattattagagaacgggtgtgagtaaaacatgttaaagttgcatatctcatttgtgaacgccatattaataattgtcactaaaaataatttaataaaattatgtatttacaatataataataactacacataattgtaaataataactacacatatgggtatgcattagaaattaattactcctatactctatcacatcctaatacgaggttgacttttttttttgacgggggagtacatggtaagtagttatgtcctaaaataaataagcatatcgtgtataaaagataatttgttttgagggagggaataaaaaagtgcaaaggaaattgtacgatgattcatgagcaatttttttggaagacaaacatgagaatctagtggcctgacgtgtcctttgcaaggagggagggaaggttacctcaaaccatacctcaaagaggagagtactatcactagctgtccatgcagtatagactagatctatacaaccatccagcatgttgttgtgccatcgatccaacacaaaagcaaaagccggagatatcacagacatatatgcatccatccatccatccatgatctgatataaatctcatcattctatcacaaaagctaaagaagggggtacagtactgtagctagctgatgattgaactcaaggacctagccatgcatatataattgtgacaataacattgcagtaggccacggagtttattgtttacttgccactgtacaaatccgaaacggcaatccaagtacgatttatattcttctttgccctttcccttattctcctatgatctgttttattttcctctcctgcctatggattatacaagcatgatgtactattactacaagcatgggccgtgtttagatttaaacttttttctttaaacttctaacttttccatcacatcaaatgtttggacacgtgtatgatgcattaaatgtggatgaaaaaaaccaattgcacaatttgcatgtaaatcgcgagacgaatcttttgagcctaattacgtcatgatttgacaatgttgtgctacagtaaatatttgctaatgacagattaattaggctaatagattcgtctcgcagtttacaggcagaatctataatttgttttgctattagtctacgtttaatacttcggatgtgtgtccgtatacttataataattttggcacacaaactaaacacagccatggttataaaactgatggattatacaagtatggtttataaaaacgatggaaaccagatttcctagacaacgaaaaaaaaatacaaattgctcggttttcaaactgaatttcaaacttttgacaagatttattctaatttcatcagttttgatttggtttatcaacgatttccacggaattcgacataccaatcggttcttgatccggtactaggcaggttcataaaaccgattgtttttcatgaaattagttgtcggtctgtgaaagttgatcagtattaattggttttcaacattgatcgaaagtcatcggttttcaataaaccagtggggagcctttttccattcaaaggccgtgttcagttccctgtctaaattttttttaagtataccgacacgtatttaaagtattaaacgtagattaacaataaaataaattacagattccgcctgtaaacttcgagatgaatgtattaagcctaattaatccgtcattagcaaatgtttactgtagcaccacattgttaaattagacgtaattaggctcaaaaaatttgtctcgcaatttacatgcaaactgtgcaattgcttttttcgtccacatttaatgctccattcatgtgtctaaatatttgatgtgatagaatttttgaaagtttgaagggaactaaacacaactaaaaacaaaaaggtactccctccgttccagaaaaaggcaacactctgtccagattcattgtactgggaggggtcacattctctcctagaatgttttttttttttttgagacgcagggagtaccaggattgtgaatccggattacaagtgggcatgcatgccaagaggtactaggaggcaacaaggcaagagacagagcatggtggatgaaggtggggaggatgagatgattcaggccaccacagctgggcaggcagcacagtccctacatacacacatcacattatatgctgttttatcagtcacctcagctcacctaggttatctggatttgcttggggcaggcatgcataccagggggggcctcctcctcctcctcctcctcacctgcatcctgcatgcatgcaaaaagcaggttttgattcacttggattgaactgatggaactgatgctatcatgaccatttcttctctcacacacatacacaactctggtactcgtctggtagacttcactccagtacggctgtgtctagttcattagtaagtttaaaagtttggttgaaattgatatgatgtgatagaaaagttatgtgtgtatgaaaggtttgatgtgatggaaagttgaaagtttagaaaaaaactttgaaactaaacagggcaagtgaagtgaaaatgggagtaaattactgtagatagaattaccagattgagcaagacttgtactactactcccacaaataattactgtagagtatagcaatataaattcattatcaccaaaggatgtgcatgtatgattgtttttctatgaatgaaaggagaaggaatcaaggaatcaaaatgaaacatccatgcaggcttcagccccatcatctcccccatcttttgctgaccaggtggctggcaaaaattgcaatggcaatggggcaatcacgcaccgaatccgcctaaagagatgggggaaaagaaggggaggaaacagcagctgaacaaagccagacatgcgcctttcattcattcatcttttgtgtttttttgtgtgtgtgaatgtgtgaatgtgcaagtgtatgggcagcaggataattggctcactgacactgcatgcacattcctgtcatgcaggacccaagaaaagaactctaatgataatgttagtggctgattgattccttcatggtccttcactcctcttgagttgtgtataatagtgtaggagtagtactccagatgctcactatcaattgctgcaacaaaacttgaagctacactatttgtggtgttggtagttgagaaccggaaaacaaatcaaggttattggcagtttggcactgtaagggcacccacaataattatctataaactctttacaagagatccatgttagcatatttttctacttggaagagattaaatgaagagagagagcaaagctatctactaacctgaagatagtctatagagaaaaacgaggcaatatattagagagctatagatacccaagtagacatactattgaggtggtttactattaatctagtctattgctgagatgtacatgttttatagagagcaacttactttaccattgcgggtgctcagcacatttcaatgtctttctccctttctttttgtaaagaaacaggagaaaagttttggcactgaaaacaggtttttaatagtactactactagtactctctccgtttcaaaatatttgacgccgttgactttttagcacatgtttgaccattcgtctttttttaaaaaaatttaagtaattattaattctttttctatcatttgattcattgtaaaatatatttttatgtaggcatataatttttcatatttcacaaaagtttttgaataagacgaacggtcaaacatgtgctaaaaagtcaacggtgtcaaacatttcgaaacagagggagtagtagatttcaccatcagtctaataacagggtttggtaattgtcattttgtctcatctcattgttttaaacgccaagtacggtaaatcaatcagcagttcagcaccaaaaagaagggaaaaaaaaagaagagctactaactactctactgcttaactaatctagttgttgaacaaaaggaaaaggacacaaaccgtcttttttctttaattatgagctaaagattatacatgtctcatgcaaaagtttaagctaaggttttagctcctaaaagcaaacaatcccctccagccaaactcaccattttgcaggtcacttcatcactatcaactcttaacgtgaacatgtccttccaatcccaaatgctcatcaaactgttcatcaaaagccagcaaatttatgtctcacactgttcaccagcagcatctgcatggacatacaattaaatcactaggaggagtaactacttatatctgcctcctctgattttagatataaagatattagttggcataataattaagaaaatggctaaatgtatttgtttctttatttataatatatatttgaaaatgtaaataatttatttgtgaaaatataaaatctatgcaagtttcaaaatggtctccatttagcaaaacagtttctaaagatacaggaaatttcatttggaacatgagagaaatagtgtagtagccatggaaaatgaacaataagctatatcaactttgagggctcttttcaacgcaggattcctataacacagaaatagaaatagtaggacgctgcgatactcctcccttatatttagggatggagggagtacatgattttagaaacatagcaacacttaagatattttgtttggatagttccacaggaattgaaacaattttttttaaggaaatcacatgcggggagagagagagagagagagagagagtatacattggacattagcaaaggaaaaaaaagatgagttcatgttagaattcatatattgattgagagcatatgaaaacaatccttatgcattttactttgttccaagagatagaacataggaaaaaaaattcttagtccaaaggagccctgatgctacatcacaaatcacaatatgaagaaatcaagaaatattgcttgtagggaggtgtgaaatggttatgactgaggaggatcattcatgcacagagaccgatgcatgacactgttgatcctacagaaacgccattgtttactgcaattaaaaatgttcccagtcgtaacagtaatatgtttacagcttttgtttagctttttatgcatgcccttttggactttagctttacctttgatctggccccgctttaaaggcattgtttagactgttttggattctaaagctgccatggagatagcagcagtagtagtatgggggtgcctcactgactgaagctgccaatgcaacacttgttggactctactatcaagcaacaataatctactcctactggtactagcactggtagtttgcaatggcaatgaatgtgcagtgaagaaatgggagtagtaaatatgtgtctcttgtgtcatcttgtgtgtgtacatctccatgtccttggtatgtgcatatggttccatggccaaggtttggaagcttgcaggcaaggggatataggaggagtacatgcttgagcctcttgtgtgtttgcatgctttgtcccatacgtggtgtcctactactagcaaacacaaacaggagtagtagtagtagtttgcttgtttggttttctttgggcttgtttctctgcaattgctttgcatggtgtagttcctcttccattccctgcatctgcatttaatcagcacaaatgagggcacactagatttagtactccctccgtctctatgtttgacgccattgactttttaaatatatttgaccattcgtcttattaaaaaattcaagtaattattagttcttttcctatcatttgattcattgttaaatatacttttatgtatacgtatactccctccatccctaaatgtttgacgccgttgacttttttaaatatgtttgactgttcgttttattcaaaaaatttaagcaattattaattctttttctaccatttgatttattgttaaatatacttttatgtatacatatagttttacatatttcacaaaagtttctgaataagacgaacggtcaaacatatttaaaaaagtcaacggcatcaaacatttagggaaggaggtagtagttttatatatttcacaaaagtttttgaataaaacgaacggtcaaacatatttataaaagttaacgacgttttctaaatatttagggaagtcggctatttagaaacggagggactactactagtattgatcagcacaaacagccgaacaaagttttctgaaccaatgcaattgctcttcagcatcatgctgaagaagcacatgctgaacaagctctccaagagtgtgatactagcagtgtagcacatgctgaagaagcttgctgtaaactttcgttttccaagaggatccaagagcttgtcagagtgaatacatggatgcagcagtgaaatttgtcaatgcttcttcaatgcacccctgtcaccattcatgactcatgagaggaggaaggtacgagcaaaaacaactgtgatgcttgtgcaagaacaggcaaggaatcttggacccaagaaactctcaagctccagatgacaaaattttgagcggttcagattattcagtcgaaatcatcgtcgcaagaacttgcttggagaaaggccaatgcgaaaacaaaaaaattgacaaggcatcaaatcgaccaggacactacagaaataatgtgaatgagtcctagtggagtaggagcaagaaaaaagaacaatgtgatgtacttactactacataggattagaacagtgaatttcatagtactgaataatgtgatgcttttgggtgtgtttagttcacgctaaaattggaagttcggttgaaattagaacgatgtgacggaaaagttgaaagtttgtgtgtgtaggaaagttttaatgtgatggataagttggaaatttgaaaaaacagtttggaactaaactcggcctttgtattacccatttggagttgtaggcgtttgggaagtttgggcctttatccagattacttgggccgttgtctcggccttggctaagcatttggggcccatcaagctttggcacttcaattacagagatgtgctggtcagtgttcacaggaagcaacaagaggtgtgaactgatcaacgttgaaacaaatgctaggtcagtactcccatttggccatttcagaatacttgcttctatggagcagagaaaacacccatttatcctgtggcaacttccatctactgcatgaaagctactctttgggagcgatttgcgttcagcagcagcacaatgataggaaaaacccctctttttcacgcgtattcttcccgaagtgttaccgtgtgttttaaaggaattttctatagaaaaaatgttttagaaaattatattaattcatttttaaattttaagtaattaatacttaattaattatatactaatgatccacttcgttttacgtatctcctcgaccttctctttttctcctcttgtcaaacacaccctctcactgagatgattcccgtaacaatttttgttcagacgggcattaacggcatctagaaggttgttaaataatgcggattcactgggagaaggcgagaagcaaggtgatcaaggaaggaaaaatcatggaaggtaggctttggtagcagaagcacacacgtctttcttctgcttcacaagcaaaacaccaatgaaaggctatcgatgcctctcaaactctgaagaaaacacctctgcttattgaacaccccaagtaactatcaatcatcatatttgttgatgactactagaacaagttgtccaattattatgagttattgcaatctgtttcctgattgccgttgtgttttgactcttgttcacctttcagacatgtgggcttccttccttccgtttttgcaggagaagcaagcaaagtgatagtaaaatgaataaaaaatcaggttgaataaagaaaatcaaataacgacgcgtaaaatacagtagaaaggcaaatttctaatacccaacaactcctacatatttactgtaattgttattgctgctattaacaagtttacttcattaaaagtatatttattcaataagtttaatctgattttcatgttggagtaccttggtatgattgaattgctacagtttttcatgagttttctgtgaacctcagtagcgtatgtatcttggtcaagcaaccaattcacacaaaccatgctgtgtcctgaactttttcttctttttttttgtcagatctggtcgaacaaaacgaacaagtcctaattaactaattaaaccctagctacacctacgtacatttgcgttttcggcaagttaataccctctgctggaatgatttgttggaacagaaactactgaatctgggcagcagcaagaggcatttgctgtcgtcttctccaatcaaacccctgatttccctctcacgtctcttgttgttcgcattagattcttaattgaacacaaaccaatcatgcaattcatccctccctacatgtcccttgcgttgtccataacttcaaatgggttgtttgatttgcacatacgtgtcatcaaccatatggtttgtgcattaatggcccatcaatcattcggtgtattatgcaagagcgctcaatctggaccattcatctttgatacacgcgtttcctattgtgctggcacgctcgatctcaaccgttcgttggttcatccatgatacatggcctcatcttttcgcttacacttatcagcaaaaatttgaaatttcaactgtaaattggagttggttttgagattttttttatcgtactccctccgtcccataatataagggattttgagtttttgcttgtagcgtttgaccactcgtcttatttaaaattttttgaaattattaattattttatttgtgacttactttattgtctacagtactttaagcacaactttttattttttatatttgcaaaaaaaattgaataagacgagtggtcaaacgttgcaagcaaaaactgaaaatcccttatattataggacggagggagtagtttatttttcagtctttacttttatatcgctaagaacgtatatataaaagttttatttataaattattttttatttacatatatgtcgtttcgcttatatgcttatgatcagccaaacaatagggcggggccaacaatcaaacactaaaactcgataattattcggtgtattatgcgagcacgctcaatttggaccatccattttcaatccaacggcgcgcgatcgccacacatagcgagtagcaccacctcctctttatggacaccacatttttcctctcctataaatacccctccacacatgagcagcctcttgcaaccatcaacaagatacaccaaaaaaaaaaaaaagaaaatcatatatagtcctagctagtctcctagactcctagtcctagctgcaagaaagccacattggccatgggatcgttgggtccaagcgtggtggggctgcagcccaaggccgagaagacgacggcggcggccggcggtgagcagcagcacggcggcggcggcggcgggtgtggcgggtcgtcgttccggatgccgctgcactacccgcggtacaagaaggcggagtacgaggcgatgccggagtggcgggtggactgcctgctccgggagtacgggctccccgtcgacggcgacctcgacgccaagcggcggttcgccatgggcgccttcctctggcccgaccagtactagctctagctagctacatccatggcatcagctactacgtacgttactgcagctaagctactctccctccccgtccgaaaatttgaagagcttaaaattgaaagggatatttcctaataccacgaatccggatatgctgctcattagcaacttaattttcctcctctccgacccgactacgctgcactatagcccctacatttacggttcttcttggtggacgcgagctgaccgatcgaccaagccgtaaacgtttttgcatccgacgtacagtacggggtatgttagatgcccttccaagtgtgtgtttcgactaagccatatcatattttcttatgttgtgctgcacattatatagtgtactggacactgttgtattatataggcacgtgcatctatgtacgtatgttatcaacttgtaatacaaatatattcaatatatgttatcacattgtaaattgtgtcattggtttatgcgattcctataaaattcctgcattttaaataatgctttggtttgattttgggtttcgtcatatcccaattgacattgctctctctctctctccatctgttgggtttagtctcacatcggtaattgagtcttcggggccacacggacatcagggttgatgtgacgggggagaatggggtactcctaatgggcgggtgatcgctccctcacctcccaagcaatcacccgcccctcccccttactactttacctccccttcttctcttactactacaccatacaaatttgaattaaaattcaaatttgaaatgggtatgtaaactttttatttataaactttgggtctataaactaatatttgaatttaaattcaaattcaaatttgaaatgagtatgtaaacttttgacctataaactttgggtctataaactaatatttgaatttaaattcaaatttgaatcgggtatgtaaagttttgacttataaactttgggtctataaactttaggtgtataaaatttagatgtatagaaatactatatatagaaaatatttgaattcaaattcaaatttgaatggatataattcaaattcaaatttgaatcgggtatgtaaacttttgacttataaactttgggtctataaactttaggtgtataaactttagatgcatagaaatactatatataaaaaaaatatttgaattcaaattcaaatttgaatcggatatataaacttttgacttataaacttttggtctctaaactttagatgtgtaaacttgaggtgtataaactttaggtgcataaatttactaaaataggaaagtaatgcggtgccaaaaaaggaaaccaggtggagggagggagggggaagggggatcgatcgctacccttgtcgccgggcgatcgatcgcccattagcacttccggggagattgttgggtctagtctcacatcggtaattgagattgttgggtttagtcccacatgacttaaaaggtggggacggtcctcacccatcagactagtcttttgggttgtgtaggctcagaacctagtcttttgggtggtgtaggcccggtacatgaagttgtgacggcctgtggtggagtaggctcaatgtgacctaggtggctcacggttgattggctgggctgcacactctaacaccatccaaactaatcagatcatatgtccacaatttcaacactcatttggccagtgaaatttgcttaattgcataccaagacatgataatgtaacttttcatgtttttggtcaaatatggaaaccggcaaactacataagctaatgtttcctagtgctacgtacaattccacgttaatttccaaatcctagaattgattagtctccactagcatagagcccgtgcattgcaacgaaaaacaaattaagttaaaataaattgagtttctactttattaaatcaattaataagcacgtatttagtccaagtaatactataattttccttattaaatatgtaagtgattttaaaatctaaagagagccaataattaaacgggagaagactcaagactcactgaaaggtggtgtaacagtatagattatagggctcatatatcagcggtaaagatgatatgaaaatagacacaaccactacttagaaagtagtagtatatattctctttcccaatctatttttaattctccagagcaattaattttcttctattgacatgcactttattgttgaagttatattatgtcacgttcatgcaccttaaacttttaattgaaatttaaagactattggtctgatggtctccccggccttataactaaagagttcagatttttttttaagcgtgtgtactttttaaaatctgtttgtctgtatataatcataccgtagaaaaacgcggggtatcatttagcttttttaagcaagagagagccaaccacaaagcaactctagttgaatttttaccctcttaaaagaaatagttgaattatttttgtttatcatagtttttttttaaaaaaaatttactctcttcccaatatttttagcaagagagaaccaacctctaaagcaactctagttgaattttactatcttaaaataaagtacttgttttttgttttctcaaagagtaatttttgttgtatcagtagtaccaaattcaaagcaagtgcggaagcacacttgcacacttcctatatttctctccctttttcattcccgcgatttcaagaggccgttattctgctgaatacaaaacaagagcttcccagaaagaaaagacaataaatttcgtttcattaaccgataagatgccgtaaaagaataattagttacacattagcattgatttatgaggagcatacatcatacaacagttacaactttctcgtacaagtagcgaaaagtacagatgctttaactttcaactgcatgaggttttgtaactgctactatttcacaagtatagtaacatttttatatcttgtacaaactgtatgtattgccgtttgaagttttgagttcctcagtttaccatcatatcaaggtaagatcatgtaatctttgttttgttttatcatgttgatagttcatcgcagtcatcgtatggaggagccaaggtactttcagctggtaaaactgatctgaaacaagttgtaattggtaagcaagacaagcatggataatgcttagtccataaaagttaaaattgtagccagttctaaatattgcatgttgcacctacagtttgtaacctaaaagaaattagtgccagacaagaatacaagcataatgaactgacaacagtatgtttaatcaagctagagataattcaaagccatggagttaatgaaattgcagatgctcttcactagattcctgagcaaccacaaagcaattgttgctcatgacaatattctacctctaatttataacagggaaccagcattttggttctaaaatttgcattgttctgtattatgaatagaacacacagagggatccaatagaacaatgttgagtgaagaaaatggataatcttcaaagaaactatcaattctttctttattaaacaaagggtagaagcagtgttaagaagatacctcagccaccaatgtgaatcataggtctatttgccgtcttagcaatatcaaacatcccagcatgtttagctttcttccttttaacctgggtaaagtaagttggcgactaaacatgataatataactaatgatatgctatgctcgtcccaaaatgtagctatttctagctatgaacatggacaagtagagtaactaatatcaatagaaacctactagctgtccaaaggaacaattgcctcaggtgtaggcagagcaagatccacctgttccaatggaggcaaaagggtgctggtaaacgttaaaagtatcccaacatcccaggtaaccttggatataatgtgcagtttataccaggaacaggatagttcgcctctgcttatcttctacccaatgtggtccaaaccaaaaatgcatgcccttccttcctcaatggaaatcccagaagccaggagactctacttctcttttggtacttatttgcgatgctgattttaaatttttgtcaagagaagcagtcttttaacataaaaatcattttcttctcaaacaaattaattgaattcatatgttcttaaactgctcagatgagagagagaaaaacagttaaaaaccttttggtatcgtgttctatgaaaggaacaggagtggattgaaatagttggtgcaagattgttattcgacaataagaataaatggtctagattactgtctttcatacagaagatgtcaaccaagtgaatttctacacataccgcagcgcttattatttctctgagtccagcatcatcaacaccagctcgaataggctctctcaggctcacctgtacaaaccagaatatttgtactcatttatttttttttagcattttgcaaagaagacttgttcctcgatttttatccattcttgtccaatgatattaatacaacaagaaaaatagaactgtacaaggagatttcacttttaaagagacaactggaattaacaacctgaattctgaaatatacagtgaatttaaataatgagaaataggacttgcagaaagtcggtcaaattttactctgattaaggtttaatatatcatggacactggatctgcccccacttaactttcactttcagatctaaggcacagcacacctaaacagaaattccaaaagcaacagaaggaaacaaagcacatgaataccattcaacccatccaatcactcattcagattgtgttaagacaaaaaagatgatataacatgcttggaacatcctgagcatttttagcactatacagaaatatgtgtattgatctatgttcaaatagttcataattgtgaaggaaaatcaatgagtacacatggttcaagtttgcatgattatgcgtgacacattaacactgattatggtattcaaaataagaggccacaacatcagtgaaagcacaaaaattgtccctcatggaatccaaagtagaaaattgacatattggcccaaaatatgataggaaaatttgcagaaatacaagtcaaggtttcacaaagtgtctggttagcatacctctgaggggccaaataagcacactttcaagttgccatcagccaatagtcgtaatctattgcaaccagcacaaaaatgctctgtcatcgatgtaataaacgaaattgttccagcatgaccatcaatcttgaaattctttgcggtctctgacggatgatcttgaagtctctctacacctttaaaacgttggcgctgatccccaaggttgcaagtaagaaaaattacttgtagcttccataataataataataaaaccacatgtacataaaatggctaggatgctagatgcaggcggaagaaagaaaggtaaaatgtataagggaagtgaacttttcagaggtgtaccttaccactttatccatcatctctgcataaggaaccaacttcttgacattccaaacattaccatcaaacggcataaactctataaatctgacattgacaggcttgtctctcgtcatttcaacaaaatcacagatctcgtcatcattcattccacgcatgacaacgcagttgacctggcagcagaaaaagggaaaaagaaccaattaaactgaggataaatgctcaatatgatgcggatatagctccagtttgtggtatgttaaaaagaagacaaactgcagaaatttcaggtatgcaaaaatctgcataccttgacagattggaatccaagttgtatagaagcatctatcgattccatgactctcgagtgccctttacgtcttgtcatgaactcaaactttgcagggaccaacgtgtccaagctaatatttagagcattgagcccacattctttcaaccttgggagcttcttagaaagaacgagcccattcgtggtcatcgcaagagttttcagccccttcaagccggaaagatgcaaacagatatcctcgatatcctttctaatggttggttctccgccggtcaaccggatcttatccacaccagaagtaacgaacaggccggcaactcggattatctcatcatgcgacaggagctctgagtttggcgtgagctgaactccttgggcaggcatgcagtactggcatctcagattacagcgctcggtcaaggagatcctcaggtagttgtggaatctcccgaacgaatcgacaagcatgtctgacagtggcgcctcactcagtgctacctctggcacattagcacaagaagaagttgcatataacctttgactatcatcagtagctttggataacgggcaagtgctcatcaaacatcggagccccactctcattgcatcaacctgaaaattttggttttgactgttacagcaccagaaaacaagcaattcgtttttgactggaaattaaaaattaacagcacaagctcatcccttcgatgtgatatggtactgcatcaatacatcattacttgattattactagtacccaacgcacaattacagagacccaatgcataattacagtacaaagacacagcgacgtgcttctagctgaatgattcatccaagaaagaaaatgagtagaatctcaccgcgcgatcaggccggcggcgggccagctcggagaggcaacgcagcggcatcatcatcatctgacagactatctatcccctctcctcctcctcgtagtaatcccaggaagcaaactttttgggggaacaaacaaacttttacacaggttaattaagaggagagcttcttccagatctacaagagaaagctagggttaacgaacgcgagcgaattccagacaaaaaaaaaactactccaggtgggagagagatgaatgattcatcagaaaggggatgtggatgctcacctcaccaggatgccctcccctcccggctcccctgctctgctcgcctcgacaaatggagatcggcgccgccgactcgcagaggagagggagcacgtgaaggcggcggcggcggcgaaggatgaagaggcggagttgccttcccgactcccgaggagctggggcaggtcaaggtcggtagcagccacccgacgtggatgtgggaccccaccgtgtcatcattttatgattatccaaaattctcttatactccttctattccagaataatttcattttttttctcttcacccgtttgtcccaaataagtttattttgtctataatcattacattagaagagcttgtggaagtagataaaaaatatacgtcagaagtagataaagtagacaataattatattaagatacgataaagtgagagtgttttagtgttcttttttttattattggtatgtgtgggatcggtaaaagatgagccaaaagagataataaaaaataaacttatttggaaaaaaaagttttattcacaaattattattattattattattattattattattattattattattattattattattattgctaataagcagtacaaataaacatatgcgaaacgatagaaatgtgctttcaatttttcttatcgttttagttttatcataaattaaatatttctgttgttttagttttatcctaagtcaaatatactatgtttgatcaattttagttggccagcatttttcaagacttccatgtgcaatccatataggtacaccaggatgcacaccgaattgggatctggcgtatatacaactgtcgccgacaaatctagcaaagagagccgaggccatggtcaactgcggcaggagtcagaccggacagcttgttcgtcgccgctatcgttgggttggctaggagaggtgggtcgcttccttctcgccgcgatggaaaggagggagatggaggaatcgagagagacgtggaagagagggatggcgggggtggggcgaacgaggagataagggatagagattaatgggcagggtagcacggcatgggtcaaacatgattttttttttctccatgctgatttttttgcgtgcttgtggggctctaaatttggagcgggtaaataaaaaacccaacactcatagtatttttatttgtgtcgtcttttaaaaaaccagcgcttacattatatgtgttggtttttttataaaccggtataggtgccgatttttatttttgactcctctgagagtttaggaggacaggaaaaacgttataggtgccggttctagcatttccagcatctatagtagttttgtggtgttctactactgtagtagtgttttcttcaagttggtacaaaagctgttcgagaaatttactccctgccgatcaatttttgacagaaattcatgctgcatgaatccatgctgctgtaacatttctgttgggatacgcgtaggctatgatagcataaatcaaaattttctatcgcgtaaaccgggaaccatgcaagtattagatcatagatcactaccactcgacgcgctgtgcagcggaaaaagacgttgagaagtcgaaggaactctcgcgaagtagcgcgcgtcgatcgcaccggctcgaccttctcctcctcgtgcgttctcctcgccgtactctcgcaccgatcagcaccgcaaaccagcggcgcctctaccggtatccacacgtacagagacggaacgccacgcgcagatgtgctagcacccgcgcgcggctagggttttgctcggggagggaagtaacggctagggtttctcacgtgatgcaatacctccgccggtcacacccctcacgaatatataggatccatcactcgggcctccaaggcccgtaggactcctattcggatccttatccgaattaagctcatattggatctctatccaattcccttattccggcccattaagcgtgcgaccctataggttcatatatactcggctgtaacccgaaaactccttttcggtccacgcgtcaacagcggcccctagcagaacgtattgacccaccggacatacataaagatcatatcggctgaacctctagtgtatacttgtatgaacccctttgcctcactatatcgattaagctcaaggatagatatgtgccatcctctaatagctcaatcattcactcgaacctgttgatagattatataacttgtgattgactcctcaatcacctttggcatggccatgcacttccataatctacaacatcgaggggcctagagatatctctccataggaggggcaaatcccatcttgattattcatattccactacatgtttcatagcatacccgaaaactacttttataactacccaattacggagtagcgtttagcaatctcaggtctaaggattcaacaccaacacttaatgagatcactgatgacacaacacatatggctcttgcagtgtctcatgttgggtctatccaacaacatgtgtccacattattaatttggtatctctataccatgatccatgagacatgatcatcaattaatacatgtgctgattatataaatatatttgttccacatatgatatttgatcagggatcctttagaaatagtaacaaacaacataaagagtctcatgaaagtatcacatattcattaactaataaggagttatctatttcaagaacaatatcggataaatatgtaaacatagtatgtgatacaatcatctctatgattgcctctaggacatatcactaacagattctccccaaacagtacactgcaaaaaaaaagggggagaaagttgcatgaaacgtgtggctctaaattgttcagatgccaaatcgatttgttgtttgtttcattgaacggacagccatgtcgcactgacgaagacagcataatgcatcatcacacagttggtggctggctcatgcagatgtggcgagccagcagcgtgttgcagagttaataataaccataattgtttcttgtagtatttgatgacacttatcaaagcggtcgaattcaatcttatgatggctaggtcaggtgtttgagatcagaagaacaacaggtttcagcaaccgcataattgacaggcaaatcattcggaggcattattggcagaacaatagtattattagtatcttttagcaatagtctgaatatgcaggaaatagtactatcttttagctagatatgcctaaaatcttattgtcatcactgttgctgaatcatctgttttcttggcactgcattgtcctgctgtttgtggggggtcctggcatgtttgtttgcagtgagaggaaactgatctactgctatggaagcagagatgtgctgcatctgcatctaaggtgcctggccgatcctgatgtgcatctgaattctcaaaagcctgctcaggccagagcatacataacatgagtatcctgatctccaaatagtctgactatgcaggaaatatcttttaggttctgagattttgtttcattaagatcagaaaatgaagtggggacgcaacaactgtcgtgtaccgcagcagcaagagcatgataatttcaaacatgtcagtcacatagatttattagaacatgactatcacaggacaaattttggaggtgacagcagaccttcagtacaagacctgaaattcagcatctaatgtgtaaccttcccccttttatttatctcacacaggtgattattacattttacaaagcacaaacgattaataatatatcacaagttcacaacactgctaaacaaatcaggacacaacagttcacacaatcacaccatagttttcacacccgaaggattaagaagagaaggcacttgtcagatggttcgaagcatatgcttactgaaatggagagagcagaaggcggttcaaggctctacagccagctgccccgcaccgcagagttaccggtcaccatgccattggtggatttcgagttgcgaggtgcagaggtgctagcctctgcttggttggcgggatgcttccccaaactcatgccatttgcaaacattgacaggatgttgccaccatgcacccgaccctcgtcagctggagctgccacacgacgaggagcctccataggatgcgagaaaatgctgcacctgcttgtttcagtgtttgaaggtcgatctccctgagaaagtgcatcgctgacaacgctgaaacccccatggacacgattttcatccacctgcggattgtgataaacacacaggccattcttgcctcttgcaaggcgctcacaaggagtgtcaccagctccatggtcagatccttcgtgaccccacaagcaacgcttgccgcctccatgtgccttgcaaaagttagtgcttccctgtgcactcttatcacatccagaagattggcatctcttgcccccgccatggccaacacagcggtcagtacggcctcttgcactctttgtgcatccttctaccacacacctcttcccacctccatgggcaacacagcaaagggttccgccatgcacactcttagtacaaccttcagctgaacaacgtttgcctcctccatgtcccttgcaaaacgctgtacttccctcggcaccctttttacaatcagggtgtgtgcatctcttcccaccaccatgcgccttgcaaaagttggtacttccctgagctccttttccgcaaccatcttgctgacagcggcgcccacctccatgagcaatgcacaagcctgagcgcccttctgcactctttgtacagcctgcatgttgacaccttttgccaccaccatgtttaatacagcgaccagatttccctcttgctgctcttttgcatccttcatggctacaacgacggccaccaccgtgagctatgcagaagtcagtacgaccttcagcactcttggtgcatccaaggtgttcgcagcgccttcccccaccatgggccttacaaaatattgtcttgccctcagcccccttgtcacaaccatctttttggcaccttctacccccaccatgagcaatgcaacgccctgaagaacctctggctcctttcatacatcctgggtatgtacagttttttgtgctactgctgcgctgttgtggacgagataaaccggaagtacaggctactggactttttggcagttgaagcaatgttggcattggagccggaccttgactctggttagagctacctgggaaaacctcccttggagaaaattcactcatctttgcagtcttattaaggaaagacagtacctgacaaccagatggtcggcgagcagatgtagatccttcatcaactgttggcactaagtccatatagtatggctgcagacttgggctattatattcagtcgctgcagtgaagtctgcaccagtaatagcagactgggatgacaaagacagctcaagattcaattcaggcttatccaaagccctcctagaatcacaggcccgcttatcaagcctggaagtaccttcattgcccagagtaaaatgattcaaatccaaatcaatagaagaaccatcatcactacccttagcagaagatatggtgcagccagtacccatgctttgcttgctagattctgagcttgatgagttgcccagccctagtgacaagccatcaaactttctcttggtccctctaggcaggttgtatgaactgcaatgagctagcacatcaatttgactagaagctgtaggatggctgactgtggagatgacagggaacttgcccacataggcatttggatttgagaaatttataaacgctgaccgcccaagtctggggtccattgctagagaatttctcaggagacaaaacacagccaatttttttgccaagtaccagataacctcacttccagattaaataatggttaacaaagctaaaaagttagaaatcctagggtgatgcagttcgttgattctttgcaacctccactgacaaacccagaagtatctctatgatccatcttccagtgctctagatagatagatgttattcgttcacaaagcagtaacaattctatgcttcagaataaccaactaccatggatttcatttggccaagtgagttacgttctgcagataacaaaaggacaaagatatgatcaatgatcatgataatacaactcatacacacaaaaaaaaaagaggacaacaaacacatataaagaaaattaggatgttatatgctgctacacacatgaagagaagatacaaaagttcatatgatagcaggatctctacatgcctctcatgcatttgaggggcatatgtttgtgtggcttttcgttgtactcttaaaaaagagagtactccaaaattttgtctaaaattcagatgataaaaacaggattcaaacttactgtatagcaagtgtattaacaaaatataggaagtctggttgcatcaacaaatctaaagtaaaatttcatcaattgaagtgaaatagctacaaacaaaaaaaataccctgatcctttgttacggcaatgataacaggccaattcaagctcgataatgcacttatatatgaactattaattccttaagatagagtaacttgaagttgaagcctatgtttattaccagtaaaagccagaagcaatggcccacttatgcttgaagcagataaccctaaaattcagcaactgtgctcagcaaactgaaaatagaagtcaatattagagactgatcaacatggattgtgactatgtgagcaaccaaataagtaaatactagtaatcaagttctaatatagataaccaacatttatccaatcacccatatggtcaccacagctgtaattattcggtgaaacccacccagtaatgtggcctaactagcaatagcatggcaacaagtaggggaatctgtcacttttatatacctaaaagacactcttagaacactgctagtcatctgtaacggctatgattctatcactacaatttggggggggggggggggagtagctaaattttagtatccaacactcctatattccaaaaaaacaaagagatttggcacagctcaaataaaaaagaagcaaaactttcaagaagacagtgatagagcatatattctgctacagaaatgtgtgcttaaaattccaatcatgcataccaaagcttacagctttatacgaggaaggggaatattagcaggtcctaacaaattcaagaggataaaaagtagcaaatatgccatcaaaggatcaatagggctgcaatattatactgcatagataccataattcaaaattcatttctatcattgttgcaatttgaatttggtttcattattatccagataataccctcaaatgtagaaaatgtacaattactaaaacatctttgtgcatctttcaaaaacaaggagctagaccatcaatctgctctaaaactctctaatagttgaattatgtatgctcaatcaatgccctgatcactttcaaagttctgagaaagagggaggatgatttgaagatttaatgaaaacaactgtaagtgatatagcaaatctaagagtctaccattccttcaaacaccagaatcttcttatatccaaaaagaaaaaaaaaagaaaaggagagtaaccaggacggtatctcaacctcaacgctgtaaagttctctccagagaagaaagtaatcaaggtaaaaacagtatcatacttttgcacagcacatcagttcaaaactgatccaagaatatgagttcactactataatgaattcagagactattccgactttttgctcataaaaccgcaaaatctgcgtatagtatttcaacagctggatccatgctcctccaaaccaaggctcaaacccgcacaaagatctcctttttttccccaaacaaaatcagaacagtccaccaactagaacagaagatactgtcaacgcaaacaaaaaccgaactcactaacaacaaacaaatttctaagcacgcccaccaccatctaaaagaagaaagcgttccaattcgtctcgccgcgcatctgtcaacatggagaatcaatcgcaactagtctcttctccaaagaaactctccccagaacacgatgaagattcagcaaataccataacgaattcactaaaaaagcaacctagccaggccccaacgaatttgcactagaaacatcagcgagagcacgcaggggcacaaaccttgcaccccacctccggagcacgggaccggagtcggaaggcttaattcgcggcctccctcgcggttaaatagagggggaagcgcgcgccaccgcgacaggaaaaacaatgaattcgcgcggaaaaaaaaaaagaggaagaaggaaattgcgggggaaaagaagaagaaatcgcctggcctgtagcccggcggcagaaacgacgacgacgcctggaggaggaggaggaggaggaggaggaggggatcaggggagggcaacgcacctcgcggcgggaggatatcccgatgctgcgacggcggcggcggcgatggcggcgaggacgcaggtgaggtggggggggggggggggggggaaagagagaggcggtgatgcgatgtcgggatggggaaaaatggagccgagaagaggaggacgacgcaggagcctcgggtgggtaattatcgtgttaggtgagggctttattacaagatgccattttggctcgatggctctcctccaagtgagtgatacgatctttccgcctaatcatcttacattagcaagtacaatagcatgctgcaagtcagctataaatacatatgaataagataaaaagaagagagaaaaaacgagctatagatttatagtcagttacaggagtgtagcacaaactctaaaatattatgtgtataagaggtgagactacatattaatgctatagtacataagaggtggagtatatatttataggtaactattgtataaatatatttataggtaactattgtatgaatgagctattaaattggctatagatgatttggagctagtagttggctctactattaaacttgctctaagcaaaaagcgcaaagactatggacaataaaacattcattatcctgtagttaattctcatcggttaaggagcaacgtcgctttatgtttcgtggattgcatctagttataaatattgcatgtagttggaccaatagaaattaattttggttggttgcatatagtacatttaatgatgttcatttactcttagcatagataaacaaagatgcgcttgttagaggataagatgcgcttgttagaggatgattatgttgggaaaaccttaaaaaccttatgtggtgatcaaactgggatatatagagtactgagaaatttatttggaatattgtctagattcgtatagctaggatgtgttgattttatttacttttttcaaccatgtatatatttttatactgtactccctccatccacaaaagttacgcatattatttttgtcaccaagacctaggagaaattaaattattttggatgttacaaaatcaaggagtgaatgcaagcatggaaccaatgaatatttagatgactccttgggttctcgtcaaacatttaatttatctcttcatttaagtcttaaatgcataaagactacgaatagcaataatttatttagaaaaacttaaatgtaaaatatgtctaacttttatggatggatggagtatgatagtttgatagagctatacatgtataagagaaagtataatatacgcttgtactgcctcttgtataagaggagtacgagcgagtatatattttagtttgtttgaatcttcaacattttagttgcacgtaaaataagataagtcattgacataaataattgagtatttgtcattacaaaatttagaaatgagtttattcaatttttgaaagaaacttttatataaaaagctttttagaaaaacatactctctctccgtccgaaaataagtacgtacactgtccaaaaacaaaaataagcaccaaaactttggggcgaagagagagtatcatcatttaatactttaaaaaacataacgaggaaaatatttttttcagttgaaaaaagaacgcagacttattagctatggcattctgtttctgtctgttagggaaaaaaaaaagaagaagaaatgaaaacagggcaactggcaaaaattcagggactaaagagcaaatccgacgctctacaacttgtacaggggcctaacagcaaaaatcgcacaaaaacgaaaaaacaaaggaagccgcttggaagaatcaacgacccgcgcacacggcggcgcggcgcataatccccacaccaaaagaatactaccctcacccatcgccccgaatatacccacatccctgacatgtgggtcccacacgaacaccctgccccgcacgtcagtgacgtgatctccaccaccctccgggctggagcgccagcgccgcgccgtcacgcgtgacgcggacgcgcacccgcgcaccagaaatcaatccggccgtgtgtgggtcgtgggagtggctgccaggtggtccccgcgcgccggcggggtggggtcgttttctcggtgccattggttttacggtggggtggggtgggggcccacgcctgacgtggcatcgtttgggtcggattcccttgggctctcctcctccggtcctcccacacaagaataccagaaagaaggatctttctccgcgggatcccccgccgcgtcgccgtcaccgacgccgacctgcgcccaatcgcagcgccacatccacatatacatacataggggagtttatatattactccgtactattgttgctattattgttacaggtataaagaacagagaggaggaagtaacattgttgtttggtgctgtaaaattaattaactactagcatagaactccctccgtattttaatgtatgacgctgttgacttttcgactaacgtttgaccattcgttttattcaaaatttttgtgtaaatatgaaaatatttatgtcatgcttaaaaaaacatttgatgatgaatcaagccacattaaaataaatgataatcacataaattttttgaataagacgaatggtcaaatgttgaaaaaaaatcaacggtgtcatacattaaaatatggaggtagtactagtatttgatagagcaatgctacacgtactaaatttttcttactaaacttttactaacaatcatctcaaccgtttgatttaagtagatggaagttacaaaaaatctagatgcactcgtagcatgacatatcagtgttagtaagaatttagtaagaaaaagttagtacgtatagccttttcctatttgatactccattttgggaggttttcttgatagtaccggctgaatcaacatgttttcatgattacaaaagccaattttgctagggatttgccgtgtgatttttctatccaatatttttctatctggtatgcgtaaagattcgtactaaccgatggatgagcgattcgtgctaaccgatggatgagcatcaagatcgtactaggtgggggaaaaaaacagatagcaaccatgtgttcgatccagtaacctcttggttctcacacgtacacgcttcccaattaacttactaggtggggaaaaaaaagatagcaaccatgtttcgatccagtaacctcttggttctcacacgtatgcgcttcccaattaacttacatactactcacatttcttaaggtagaagtagaattccaaactctgcaccaattatatatattaaataggtatttaattataggcgtgaattgtgaaattaaagtgttccaattattatttgatgatgaacaattgatttgtgagataattggtttttcttttttgatatttatttgcaaagtggtgctatgtgtagagccagttagaccggtgggtagtgtgcggttagactagccaacccgacggtctagtcgactagctctgtattaaagttggtttcaagttgtttgtttggatactcatgattacttcatatttataacttctagataattactatacgtatataatactattgtgtggtaatgttgagttaagttgtggaaaaacttgtgctcgaatatgatttcttgcttgatttatgtgtaagtgtgtcttaatgcctcgagagagtgttgctggtgatggatcgagagtcatcctgtcagactagcaacataggtgcggtataaccggtgcatatctggctctcacacagaatttcgtcagaacttcattgaatttgagggtagcttttaattccgctaaaagttttcgttttttggtgtttatatcattcatcccatctgataggcttggttcttatatttccatcccacaaatatcttgaatactctttttttttatgtgaggagtagaatttttttttctcttgtgatgatgggacacaacagatgcaatagctcaatttccctgtataaatcagctgagaatgatcacaatgtacctccaaatgcatgcaactacagtccttcaatgtccgagtatcacttgtaaaagatcattgacaatttgacattgcgatccattttttaataaaagaaagcacaaaagtatagtgtcttgtgctcgcggctatattcatctatgagaaatcgcatctttttcttttcagtccttgcttggtgtacatgattttacaaatataaatatagcttacacttttcgatcgaagaagaagatgacacagcgatgtttacataatcgtaatgaattagtgccgtggatgactagctttcgtcttaagttgacgcttaattaacatgaagatacctaccttttatatttacttgattgaccttaattctcatgcacgaacgattccaaaagggtcacgggatattcgatccggttgttaggtctaacctcacctcagattagctacaaacatatttgaattgtttctttttcgagggaacatgtatggagttcctacaatttcagtgtaaaagttgattcactttataagaaaaaccggacccagaaatctagaacgacacggttaatttacaaaaaaccgatgaaaaccttgacattggcatactgaaactaagaacagggcgacatcgtccaatccaaaagaatctaaagttttcacctgctgaattcccttgatgtggagttgaatgagaactccaatagcaatgccttcaagaatgtgaacgacacccgagggtgttgccgttgctagcaccggcaagccgagcaaggctttcacctcggagtccccttcaaccatagcaaccacagcggaagccaccaaatgccacctgcacaccgaaggtacttgcactattcacaccatctgcacaatgaccggactccaccgagcggcggagcaagactgacggcgccatccgacgaccacacaggctgcccaagcttcattgagtaacctcgacgtcgggcccagccacactcaacaccgactgatgatgtgaccatggctactatagatacaaccgtcgtccacatcaagatcaagccgtccaagttctgcaatctagttcggccacctgctacagtgtcgacttcaaacggccaccaaatatgcatgcgagctccattttaggtccatgagtacttgatggaaagctctcagagtcatctttccaatggatccagcttcatcgccaaattccatcccagtcggccgaaatcacaaaaagaaggtgctgcgtcacctataatgggcctatgggcttgtaacttcgtctggaaccccggcccaagtggggcccatgtggggtgcgccccaaccaggtggagcacgaccctagggtccccttaggtcgtcctcccacctccttaaatagttaggtacccctttagagtttcttgggttttgtttagatgaaagtttagccattgctacttccttgcagcgcgcgtgtcggctagaccgtccatctgcttgttcttcggaaccccaacttatcttgtgtattcattcctatttgcaattcagattgcttctatcttgttcttgcttgtttcttcgatttgcttgcaggaataaggttgatctgcaccggcaagatcaacaacccacggagaggtgtatcgatcgctaaggcgcaacacaacgtcttgtacggttgtagtcggatcaccaacgtttctctcaaatcgtagttacctacaactcaccgaaagatcgggccaacaacagccttgagtgtcgagaggaacttagggttcatcaactgaggatgccccgtatctagaccaagaggagccagatctagccgtcccccttgcaccaccaccactggccgatgccacaacgccgccaccaacccgggatggaagagccaacgccagatgcggggaggcaggccgccagcaccggaggagatgaccggtgaatccccagatttggagaaaacggaaggggaaaatggagagaaggaagaagaggaaaggaaaagaggcttaggctgactgcaggaagggccacgacagtcacctcaaatctagaggaaaagggtggaagggaaaaagagagaaaggaagaagaaaagggtggaagggaaaaagagagaaaggaagaaggagaaaggaagagagagggaagaaaaaggagggaggaggggtgcgctgccgctactgccgaccaccaccgtaggcggcggcagcaaggccagtggtcgtgcttgggaggttggagggggtgggcgggtttcgcctcgtgggtcgccgagagaggtgacacgggaggaggatgtgggttatcaccaaacatatttgaattgtttcatgatgagtaaattttgcgagaggtatactactggttaaactataggattttatgaaatttatttgcctatgtttggttgttcacttgtagagaaaaaactaaacctcagtttggcacaggtccggaccaaattttttaattggatatttctaactgttaaaccttacagaggtgaatcattttattaatatttaatagaaaatacaaaatttcagaatactataatttaacttataaaattcagcaaggatctgggatatggaggcatgacaaataagatctgattgttaaattgttatatgaattttgagggcaggaaaataatgtgcagtagtgttggagcttcggagggcgaaaggcacgcacatgccctagatagttttatttggagcatgaggaattaacatcaatcacaacgatcagtcataagtcagatacacttaaattttgctgaagctatagtgaattcagcacaaaaatttaaaaccatggaggaggtcaaagctcctgctcacctgccagcggcaaacaattatttccttcatcctttcattcgagatttttcttttttacttttttcaaatgcacataaggccttaatttgttactaacagaagtgccactaaatattacgtaaacaaaaacaatacaatgttcaatactctttggttaattataatataattataagttattgatatgttttactgtgcttgcatgctatagaaaagtatcgtttctttcagacacaataaaacaccgctaaatccttttctttgtcattgttggaatcgattgcttgttcaacaacaccggagcgtattttaatgtcctcgttgggttttttttgtgtgttcttttactccctccgttccaggttataagactttccagcattgtccacattcatatagatgttaatgaatctaggcatacatatacgtctagatttattaacatatatataaatatgaataatgttagaaaatcttataatatgaaactgaggaagtacgtaactttcctcacacttttcaaagataaccgaggacatgacattaacatgatgagaattaataaagtataattgggaggtgacgttgacaacaaactctggccttataaggttgacaccaattaagcatgcatgaacggcttgtaacgtgcttttgtaatggaataatgtaacaaaatcttttgcgtgttctggaaaataatagtttccaattgtgaggtctcgactagtccacataagatcgcacttatgtgcatgagttactaaatattttttttggacactttctctactaattcgccgatcgatcaaggagaggtaagaaagtactcttggttcatctaaaaagaaaaaaaaaagaaggaaaaaacaaagtgctcttttgatcctttctgatctcagtggctacgtgttttccagaagctaagctaggttgcttttaatcgtatggacacagcatggaaaatgcttggaagaattagtgcgtagtgacaaatgcctgcacctgtggggatcgagtggtggccggttcattgcacctagacgttgccactgaccgttgctacgggcaggggccctgtttagaagattagcccggggctaattttgagagctaatgtttagttatgaattggtaggctaaacattagcctagggtggcatgtttggatccatgggctaattcaaggctaaaaggtggagagatagtagaaagagaggggagaggagagagagagctgacttttgatggtccccacacaaaattagccccattagcaccccttagaggggctaatgttttgaggggggctaattcatattagcccaaaattagcccacctgtttgggtccttgagggctaatttgaggctaaaaggtgagggctaaacgttagcccatggaaccaaacagggccttggttgattcttgatagtttatgctttttttgtattcatgtactgttggacaaagtttacttaggatctatttggcacgacttcaactctaacttcaccgcttctggagtaggagcttagccaaacagtttcagctccacctaaaataaaagtagagctggttgaagtgtcctcacaaaataaactagagaggtagagctatgtttagaccgctcaacaactccactccaaaccaaactcctaaaattaaatttaggagttggatcgagttctaccaaagaaagcctcatcctacaaccacaaggttggattcaaccaagtctagaaaacaacgttgagggcttcgattttcaaaggaaatgtgaaggatttgaatccttagtttttttttcctaaaaaggttgtttgatttgggctcacaaaattcctttgaaattcattcatatggcccaattccaaatgattttaaacattttctatgagaatttcaaagcaacatctctcttctcttactcaatctaagtaccactacataatctcaaaattcttatatttttccggtgagccatccaaacacatgttttgagcaatcctatgattttattttccacagggttcaacatggcacgatattccaatcctgcttcttttttctattcgtgcgattagaatcttgtgttccagaacttttaaactgatatctttttaagcttgatcggctttgatagttatgattcaacattatatagttgacaagtccaagattgtttttagacttagagtcaagagaacctttacggtatcataaggtatctgataccttcaggtattaaatattacactagtaaatatgggtgtgttcggctgcccaactgcagcggctgtgcagcgctgctgctgcagcagcagcaactacgtagaaattgtacgttgttactgtagctgctggctgccatctaggcacgccgaacaggccctatgataccacttaggattttctaaaggataataaaattacccacgaattaaagttcaaggttatattttttttcccattttgataatggatatacaaatgagatatattaaattattcataattactatcaacgacgtacaatgtgatagatggttgagtgacatttttttttcttaacattggaacttctaaccttttgtctgagtaatggagtcatttctaaatttcttggcctcctaaaattaacgctgcaatttataggagatcatccaattagcataaagaagatagcaaaatgtatggaacaatacacttgtttttaaaattttaaaagttcgacaaaatcttaacttgaacgataaggtccaggaaaaacaaatattccaattatatattaaagattcatatgaaggacttttacataaatgattgaattatatccttttccattgaaaatcctatggaatagataatcctgtagatattttgaatgaaagcaagagctccaacctctttaaaattttccttcgagtatgtctttctcatccaattcctgcggacggcctaatcaaatgatcactcctatgtttttgtgttttgtaattctctcttttgcgctgacatttgtatcaaaataatgtgtttttctttttttttaatcatgcgtttcaaagaagctaccaaagcaaaaacaaaggaaatcaatagtggtcgtgggtgcatggagggattactccacattaccctagtgactcatgcatcatggagctggccagctgggctaattgaagtccggggctgccaggtatgccaaatcagatccctgaatttgtcaaacaacctgggacctggctatagatgatttgcctggtccagttttgtaataaaataaaactgtagtgttcaattaaaagttccagtcagtaccaaggaaaaaaccgatcaattaattgtcgcacttgcccgatcgaccagggaacaaatggaataattatcaaatcaacattggccttatttggagaagtaaccgagggttattttaagagctattttttagcataaggaatagctctccaataaaatagcccttgagctgtttggatccaagggttatttggcacttttccaatcaaactaccactcaactctctctttccactggatcttgtgcacttgtgtccttggtgtggctgatgcggcaggacatggagccgccggtgtcgaggtgctggtggatggccatggccagcacctgccggtgcaggagctcctcctccgcgggcatcagatttaagcaaaaaaaagagccaaggagaggtgataacgcagcaaacgaacaaacaaaaaaagagaaaattttatgacaacaaatcgacttgtgcttcaacagtgtggaattcaattcgcagaggaagaaatcaacaagaagaacaacaacaaactttagaaacgaaaaaagaatggaaggtttggggaaatcaagaaactgtgagcctagagagcggcaagattagattgaggcgacgagccatctactgtcttctgtctctctttctctgcttcgagttcgtcgattcggttcttggtgggggagaaaatcactcgtctcatagtcggtcacccaggtcagcgcagactcgcgccggatgctaccccgccttcaccggcgccggctcaccgccgtttcgaccgggccaacgagggaagaagaggaggaggaggcggcgacacgggtgacggccgcagtgccggcgatttgtgggggcggcgccgccggtgacctatgaatcgtggggacggcggcggcgaatattgggggcgagcgcgcgcgaccggatggggaggggaggaggatcccgtgcgcctgtgggagagagaaaagacacctttttagtgagtcccacccgaaatagctccaattagtaccgcttagatgggatagtttttttgggtgggctatttccaaatagccctcaaatagctcacccttttggatcttttggggctatttaggctatttgagggagggctaaaaaatagcccttggatccaaacagggccaattgagtaattagcataagcaagatgcagaaaacaagggacaagaaagcaaagattcatgtcggaggcaggatagaatatacacctcgagatcccaaactgagcgtcgttttcctgctctacgtggaatctactcacggtgcatcactggctgcatctatcgcaaagatctatagttatattggtcagtttatctccatctccatctctacccaagttagggggaaaaacccatgctcacacagcttaatcttgtgctattttggtgtcatacgttcgttgccaagagagagaaaaaggctctgtggtgtatctgacactactagaaaaagtatttttctcaatataggggtttcattttcacaggcggacatgactcttaaagccaaatgaccgcctacaaaaatataaattagggtgaaatggtcggtccgcctacgaaaatagacttaaatataaataaacttggtagaggttgattttttctaagtctccacccacggccggcctctcccctctccacacctcacgcctcctcctctcccctcacgcctccttccctcccctcacccctcctcctctccccagccaccggagggggagtgacggcggccatggcgcggggtggcgcggaaggcagcggggcgacacggcgtccggctggcggcggcggctcccctcccccctccctcccagatctggtcggaggagggaggagggaggccagcggtggcaaatacggcgcggggcggcggcggcgacgacgacgcgtggggccgcggcggtggctcccctcccccctccctcccagatctggccggaggagggaggggggaggccggcggcggcgacgacgacgggtcggggcggcggcggcgacgacgggtcagggcggcggcgtcgacggcggctcccctccccccctcccagatccggccggaggagggagggggaggctggcggcggcgacgacggcgcggggcgtggctcccctcccctcctctcccagatctggccggaggagggtggtggtggcgaggcgcgtggcggcgtcggcgagccgccgccgtgatttttttttgttcgtttcatggattttcgcaggcgggctgttgccccgactgcgaaaatcgttgattttcactgtcgttgtgctacaagcggtccgaccctccgcctgcaaaaatcacttttgtccgcctgcgaaaatactttttctagtagtgtgaaagtgtattttcattttcaaattcttctcaaaaactgttttaccatatctcgaaaatgctcgccatcgagcgctcaggggagggagccgaaatcgggcgctccctccctccaagacgcgcgcgcccctaggcccacccacgtgccccctgcccccacctgccacttgtccacacacaaaactccattgcaataaataacccacatattttggaagccctctaagggatttcgtttcattttttttccaccaaaaatgtttcacctagtgtactcacaatgtttcactatgtatagatctaatgttgcagtgaactgaaacatgcttccgctatttactgaaacattgtttttacataaggtgaaataacatccgatttaaacgattgaaacattttcgatctacttagtgaaacaattctaatatacttggtggaacatcgtgcaatatttaaaaataattcaataatagggtaaaaaaattccgtcaaaatataaacatgtgtggtcttgttttgaagatttaattacaacaaatttaattgtgcaatcggatcatgatttggataaataatttaagagaaaatctattttaaagtagttttgcacacatgcgtggcgccgatttttgcacatttggatcgggcgaccgatccgtagtcccctccaacatatctatgtaaggcatgctgccaataaatctttttcttttctttttacttcatccaaacttctgtccatcgtgttatttggcttatttcggatctatggtactccctccgtcccataatacaaaggattttgagtttttatttgcactgtttgaccacacgttttattcaaaaaattttggaattattatttatttttttacttactttattatccaaagtattttaagcacaatttttcgttttttatatttgcacaaatttttttaataagacgagtggtcaaagtgtaagtaaaattataggacggaaggaataaatgtgcacatcactagactgtttatatatacatagaagatatcacacggtttgagtatgatcagcatgccaattttatggatccatcactgtacttatctatgtacttcttccgtccgaaaatataaaaacctaaaatcagataagacatttcctaatacttactatgaatctggataaactgctctaacactatgaatctaaacaatatcccattcgatcctaggttcatattttggaatagagggagtatttgggatgattcctaagttgacatacctactcaaattaacttcatttttttatattagcatatatacctagcaactacgggatacactcatcccaggctaataacttatttccttcgttttatgttataagacgttttgactttagtccaagtcaaactactctaaatttgactaattttataaaaaaaaagtagaatatttttaacccaaaactaatatattatgaaaatttattcaattatagatttaatgaaactatgctggtgttgtaaatattaatatttttttatagagtcagccaaactttaagtagtttgactttgaacaaaatcaaaacgtggagggagcagtagttactgaagtattgaggaattaggctgcatagtttgaccgggtttaacagcacatggtatgatgctacaagggtccaaacaagctgataaaatcctagcagttttctgttgctgtcacagatctttaaagattacctgcatgttggaaatgattcaacacttgcattggtttgacgccaaacgatgtatggccaattgagctgccgtcatcacctgcactttgccacagcagctcgggcaaaaaataaattgacagcgtactgaatctgcaggactttgtaaaagataaaaactaatgatgatgataatgccctgcaagaccagcaattgaccgtgaagtaatttcatatcttctccagctagctctctagtaaaatacatgtatggagccagtggattaacatatggaacttgtgacgtagcagcgagcagtggatgctgatgttgtactagacgctatggtatcaatgttgccagtatttctgtttcttggggaataaaaaagaaagcaccttttgctaatggtgcaattccagcatttttgatcatgcatcaaatgatcataaaatcataattatagaaacagttgccaaggaatcaagcaaccttacaggaaaaaactagaggataaagggaaaaacaaggggataaagcagtggcagcagaggaagggggagtggcctacatcaccatcaccgtcgtccttgaccaccgacaaagccagaaccacctcccttgacagccagcaccgcccggcagcaggggaagagggacggaggtagcggcccaagcaagggtctcactctcactcaccgtcggcggcggtggagcagaggcgagtaggtggttgagaaacgggcaccgatgggattggggatggggatggatcaatagatatatggcttccatttagtgattggactccataaatataatgaaaaagcccttcatttcctatttttctatctgcgtaaggcgaagcgacgccttaaggcataaggcgtgctggggtcaccttaccttgccttaacacccatgccttgcacctgaatttgatacttccttacacctggaagcaccgcgaagagacgaccttttttccgttgttcaacaatctactatagcatcatacaaccatgttgacaattaacaagtcttatatatcaagaaaattggctagcatataacaaattagtgtgattatatttagtttatgaacctttacagtggtcaaatttttacttcaacaagggtttcaattaggcaaaagatgtctgaaaaccactataattcagaactgtaatatgcaattaggggtgaaggactactgaaacagtcatagtttgccaaaagattatacgccttatgccactggttatctttggtaaggattcaaaagggcaaaacttctgcagttcttcatgaaccaaggttctaaaaagtggtaagcagaatccatgcagccacctgccttgtagatgcttatatggcctaagtcctaaccagctgcttatgtgccctaagcagtacaaggttgcacacaaacaccttatatatggccttgcagaacttctcttagaacactcgaataaatcatgaccagaactgcattgaacatagtactgtaactgatcccaaaatattaggacatagcccgttcaataaactaagcaccattggtacagatgccaaaaacagtgaaattagcatcagtagtcacaaaaactgtataaagttacacaaaccaaagctaaaacatccgtatcgtggtaaaatgctctctctttttttaagcacagtgaaaataatacagttggctaggatacacaatatcagaatgaacaaaacagatggtggaataaacaaaggatggaacaactggatgactggcagcactcgaacacatgaacaaagcaaattttgttcaaaaactgttcttccagacaagaaaaggtagcactcgtattctaatgtactaccagttgtttgtaactacagaacttacaattgctcttaagctggaacatactcaagtatcgggtcagcagggaagtcctcgtatccacttatgccggtaattcttaaccttgtgtttggctgcaaaacaacagagatttttaatctaaaagaactctaattgcttcgctgtaaaaactgaatcagtatttatcaataaaattctacctttcttgaagaaggtaattggaaaaacttacctgtctgtgaccaagtttcctctggtacttcttcttcttcttatatttgaagactatcactttatcatcccgtccctgatataaaaatattggggagacatcagggtcaagtaattttgaatatccatgattaacccgacaacatacagaggacatacctgttcctcaaccactgcatgaacagcagcattggtcaccactggcatgccaatgtaagccttgtctctagttgataccagtaataccttgtttaatattatctgcacatcagcattatccagaagtgagaatttctgggaaaacaatactaaaaatgccagcaacataagccaacgtatgggtcctatgggattggaagctttgcatcagaggagtaattttagttagaaaaggaacgaagctaatatatgcaggctacacaaaacttatcgaaaagttctgaataagatatttatgtgaaatcaggaactgggattgaagtgttataattacagggaagtgactcttttacttctaaaatgaagtaggtcactaccactttccataatttcagaatgtacaaccttcctcgttgttttgaagtttgttattgcatctcatggatgaaaaagaataataaccaaataaccaatactatatatttgccttttcctaatttacaatcaccttatctagaagccacctcagcatcatataccttttaaatttatggattaatacaaaccaactaactagcaaaaataggccaaatttctagttagggtgtaacaagtatcctcctgcatcctctaaagtggaagcaccagacctgatcattgacattggcgcctttcagcctctgcgtgtatatataccttccaggcatcacaatgtactgtctcgacccaatctgcgacagaagaaaaataatcaaaatagctccctcgttattattcacagcgctcatacaaaacaaaacacagagaaaccctcctcagatgcactcctgcatatttcagaaatgcatccgaacaattctctgtaagactagtattgtatcattcgaaaacactgtaattctctgcgccgttttcttaatggtgtgtcctgtacatactaataatcggcgtgcgcgcattcctattggcgcgtgaatcctaagcttcttatgcagcatagagtaagcaacacaagcctgaaatcaaatgctcacttcaccgcaagaagcaacgcaactagcgccaaatgcctgtgtaatgatattatttaaagaattcgaggtaatgtagcatgaacaaatgtgattctttttttgtttgtttgcagtgagccgagcaggactaaatctgaaatattggcggcaagggcaagctagccccaccatgacaacggcgaagatgtcggcgtccttcccggcgcccgcggctgcgatctgcgcctccacaggctccggcaccgcagcctcctcttcttcaacctcctcctcctctaccacctccgcctcggcctcggcctccacgggtgcgggcgccggctcctcggcggaagcgaggagccgccagcagcggcggggcgcggacgcggcgacggggagggagcatcgcgaggccgggagggacggggcggaggggaaggctagggttttggaggcgaggaggcggaggggcagcgtcgcggtggccatggccggcgcgcgggggggaagagcagtgtggatgagagtgtgggctatcgtatcggaaagaaagaagagggataatattgtggatagggaggttaccctgagccgttcgattggagatcaacggctcagattagatacccatgaaaaacatgaaactatgccctactagttttttagcgatactgcacgtactcattttgtttctcctttctaaagtttagaatcgtttgatttaatcagttaaagattataaaagagttggatcgaatgtgttgattagaccataaagaatatgcgaattaacacgagtgatgagaactctcgtgaactctcggacgaaagagccaaactgaactactacgcctcctcgacccctcttcctcacaggctcgggtgaccttgccgccggcgaggtgagggagagaagtccgacaaactctctctttgtaggtcaatcaatttagttgggtttttcttttagtttgagcgtgaaggtcggcgatgttggccttctagtcctaggtttcatggagaaggcaatcgaagtttcttctctagtggtatccctctaaaacaccgggtaattctctatcaccgtgagttaggagaaagctagacctagttaagggaagttaggcaagttatctttcttttctccagcaggcttttcgcaaggatgatagttttcttcctctttattggtggcaaaccttcaagaagcagttgagttttgtttgctatatgcttggattcctcaaccttaggctatggaggccctaataaggtaagcttcttggtgcttttttatgcaacttgccatgaaatctttgtctctatcaccaatatcaacgattaggttgtcgaccttgatggttctgctccaagaacaatctcatttagctctggatgtactcatctatggtattgatgaaccttttcatgaattgtcatggccttaacctctattgttgtgaaaccctatttgggaatgcgtcaaggcaacatcttctgtagctcgccgtgtccatgtagcacccactgccatcaagtatgtcaccagtcaccaccaatgtgggcataagacagaggaggacctgattgttgttttttttttcaaatcttgttgagtcctcctttgcttatattttgacctagccatcttaaagagactatcttccgtactcccagttctatcaacaatgaacattgacatgttcagtagtcacatttctatggcattgcttcgactgtgtagccgtagccaatgcaaggtatagcgcactattgcttggcctgttgctatatgctgcagcccatgcaagcgcatcaaaggctatcaaacaacattgataaactgtgagactgttatctaagtttgtctttaaaaacaagagtacaaaggacaacctttttattatttgcaatgataagttttctaaattattaagaaactgtgcagtacgatttccaacataaaagaatatcactttaaaggccatgacaatcgatgctgaatcgattaaataccatagcttatatagaagatgtttattatgccataatttatggccttttatcattcgcaaccataactttttccaaattatgctaccaaaataataataataataataataataataataataataataataataataataataataataataataataaatcagctatagaagttaaatagcaatcaccttcacaaccatgattagcctatatatgtaagatattaattacaacataaagaacaaacttttataatttgcaatcacagctattccaaattattaagaaactgtgtagtatgtttccataataataaaaagataagctacaaaagacacgccgaatcgattagatagcaatcaccttcacaaccgcgattagcccaacagtaccccatcatcgccggattgcaatcgctagctcactcgccgtcaacacctcatcacattctgtgcataggatgatgaagctattctacatgttgctactagccctttccctcgtagcacactattcatgtaaacttccctattgttcatctattgtattccataactaggatgacaaatctacatgggtggagatagtcttttttctttacggatttgctatattacatttggcaaaaatttggggtcaaaatcatgattttttttttaccttgcgatttgctctatgatacctgcactacctagatccggattaatcttccaacaggctcccataaactttgacaacctcacaagtggtcaaggtaaggggttagggtgaaggagggagtgggtggtgttggcagcgggggatgagggatggtgggaggagttccctactttaaaggggggagggggttggttgttcagggtgatgcaggacaaccaataggtgatgacgatgagaggtgattgttgcgctgacaaagctgtgttgggggaagagggcaggggtagggggcatccacaaagaagaggttcgctggcggtcattgactgcgatggatccaacagcgatatcaagatgaaacaaggttgtaaggagaatatggcgatagggagggggtgctgtagtttgatggctacaaaggtgacaccgatagggtacagagtggtggggtgcagggtggagggagtggggaggatggaaatagcacgcaccttgtgtccggtaacgaccttgattctatctagcggttgacctaggaagaaaataacgggataagaagagaatgcagcaaagatctagatggttcagtttgaatcctacggttaaaagattcgcatgacataatgccccaaaaaaattaattacatagacaaattcctttttattgcctaaaggcatgagcgttgaatgtgaatttcacataaatatttggttatttcacttgcttgcagatatgtcgatgaaggcattagtcgatgacagaaccccaaaagactcatgcaagttcaccatcacacctggcccctgttttccaatgttgtgccttactgccacgcgcaagtcgctgcaatatctactggcaagtgcactcctgagggatgccaatgcacctactgtcttccgtctccacctctagacaaaaccaactaaataatcatgtattcctttcttcttgccaacgacatacttgaccatttgttaatctataacagtggtaataatatcataaaccgtataaaaccgtggcagccgatcatgtgcatatgcttctggtttgagctacaaataatgtgtaaattaattaattaggagctggatatcgtaactaagacatctattttatttaggacaggtcattgcaatatcatcatgtgtgttcatataaaacaggatggtgtgtttgactatagaatacaaattagtgcatgctgagttgggtatccaaagcctaccatttttcctgaaacaggagctatgcccatattagagaacttttacggtacaatatactaacaatatatattaaaccctaaaccctaaaccctaaaccataccctaaactcttatattaaggagaagaggctagccacgagctaggggcctacaacttgtgggaggtttatgttaaggggctattatacacgaaaggtgttttctttgtaaacacagaaaagatctaaaatagtgaaagcaacaagctttcttgcaaattactgcgccacgtcatccaataaatgcgggccgcccgatttcgcttccggatgatacagaccgtaggatcctttgattggcgaaatatcttattgatcctttaggaaacttctatctacttctagtccttccacgtccctgggtacttacgctattttcattttgccccctacatcctaccgtggacgccggcctgccaaagccgcctccaattctcgtcgcccctcgccgccgccacctcagttccttctccccgtccaccttcgcccgcactccggcgagactggggcgccgcttgcctactctcatcctcgtcttcgtagccggttagcggccctgcctccgcctgctaaggtcgtagctgttctcctccccaacagcactgtagctgcgtcgcctcctcccgatctccgctgcctcctcctaatccctgcggctagggagagcataggtaggaggaggttatcgggccctccatctagccaccagcctccaatattcctgattcgatctgaccatagcttgacctatggaatcaagaagaggagaatcggaagaagaaggcaagcgaccgctgaagcagaatgagatatacagggcatggtcgagtgccgcgtggagccctcaatcaacagcagaggcagtgatgcgtcagtgcagaagcaagggaggtaaaacggtgcgagctcttcgtccattacttacttttcttcatggtagcgctggatcctgtcttgggaatgatagctgaaatgttcagctggttgacaatgtcaggttggtttgtgatttgtctgctataagtgatggtgtactccatatcagctcaagtgtcatgcccacagaaatcattaagagatactttaaggaaaagtcctgcctcttggatctcatggagttaggaaacaaggtaactgaaggtcctgatcaaacgcaccccctattttgttttaaccttgaaatgtcatgtacgattcaatttatatatagtcttcagactgccatgagcaaaggatctctcgagatacagaattcaacggtatgcatgcaggcagtatttaagcaactctactcaagttaaaaaacattattgatatatcttaatttactgtctaattatctacatcatgaagtagtccattaaaaaatctgaatacacatatttaaatacattttctacttcttctcttgagttgattctgataaaaagttctgaaatatggtccaagtactgctcaggcatataaaacaaaaacaatttattcatttatacccttttaaggttgtgagtcatcaaggatttcatcaagattctaaaaatacatgccatgccagtacatagttccacatttagactgaaaatcttattgctggcattcattacttgatttctagcgataatattgtggtccaggcctagcacttgtgtatcaattagattgtacagaagtcatttcgaatttattccatcagctcattacctgtaccggtcctcagccgaagtattcttgcctgtgtagctccatgttgtgtgcttacgtgttctattgaatttgatttgttctcttactgaattgatgattaattgttgcttgtgtgatgactcagacagattggagaaaccactcacaggtatggtgaaggagcatatttaaggtagaagcacatttgaggttgtgtgatacattccttttttgggttaatttgagtcatgccattacaaatatgtcatattagaaaaatgccattacaattcgcaatatcgactcggtgcctttcttttttggctataaccaacaacgtttgcactttgcaataccagatcagcttattcccagaacacactaataaacttttctataataagcagcaacttggtatagagacaagttgaattgatcttttttcttccagagctgcattttaacaccataaaatgaatatggtaggatgttttaggctcaatgattggctagacaggtaaatagagtcatacgtgccatggttaatagtctgtccaaaatatagaaggcaagttatttagaataatttataataacaacaggcaatcatgaatttcagttttctattgtacatatgtttataaacagggcagtgaactctagattctttaccatctgttagatgtaaacaattcaacaacataacattttgtacatgaaaactcggccatggcacctttctcgatcatttgtggcgtcaatctcctaaatactaaagtttcaccaccaagctcatcatgttaattcctttataagataacatgttttctttttgcatccaacagtgatcttgtgccaatttggtggttcaaagtgatggcaattttctaagcagcgttcacaacatctgagacactccccacttccactcacctaggaatggcaccttcagtgcctctgtttgaggaataaagcaacatggaggatcacacttatgtaacctctttctaaatggcaacataacattaagagtgttagacatcattgtacaatctcatacattacgatccatacatacagggctttatagggccaccaaagtcgcgcaacgcgcgacaaagtggctagttaagttctaaaagctacttcccgttttcttaaaaaaaaaaagctacttcccgtttcaaaataactggatgagacattagtaaacgaacatggagcagccttctttgtgcaatgtcttctattatttgcgtagctgttttgaattatatgctcgaaatttgttagaagattattttggttctctcgagctacggtttggaaagtttctcattttccggacatgttttcgaaaatggaaagtgtcagtcggacattttttttcgaaaattttcgaaaacggaaatgaattcggaactttttttcttggaaataaaaacaaatacagtaaggctactattcgtaggaaaccggcatcgtaaactttccggaaacaattttggaaactttctggaaacgaaaacttttcatatacagttgattagctttagccttctctactctatgttcagatttttcatagtattgaggtggttagttgaatgaagattttgattttagtacggtactttagatgttttttcttttgcctagttactgtttcattatttggccatgccatactaattacaggtatagatgaatatagctttggttcttatggtaagtgaaccgtacaactagtcgtattatatttaaaattgataaaaaaaatatagaaatgtcgatttattattttagaaaagtaatgagctacactcttcgttagtttgaaaaattcagtgaggggttttctattatgataaatatccgttaccgttttcgctatgttttcatattcaataccattttcatatttgaggtttcctgctccgattccgattccgaaaaaagttatggaaactatagtctccgtccgtttccaagccgttttcgtccctatctcgagccaaatgccatttcaaacagccaaatttaaaaacaacaaaaaaaattgcatgcttgaatttgcctcaagaaataatgtcataatatcataagtttggtacattttgtaaaagagcataatgcccgtgcgttgcaatggttttcttgttaactaatatattatcattatgttaattttgttgtcatttcgtgagatgaaaaatttcataatattgtattgtcggacaaaaccagagtcaaaaccgtcgagggacctagtctttagtggttttgtaagttgggggacgtgttgtatccggttttatggtttaaggatgattttgtaattcgatgacaagttgagggaccttcggtgtactctttccattattttatgcaaaaggaataagtccattttagctccctcatctcttgccctttgtcgaataacatccctccaccacaaaaccaggtataatgactccctcatctccaaaaaccagtgcaaatcgactcccaaggcagtattgagtccagttttagcttatgtggcatccacgtggcatctaggtggcattcactgtaaaaaaattaggtgggacccacctatcacccctcccctctctctttcatcttctcatctctcacagccgccttccattggctcgagcggcggcggtgggggaggagctcgccgggaggccgcggccggctggccgtaggggagaagctcgccgggaggttgcggccggctggacgcgggggaagagcttgctgggtagtcgcggccagccgagcgcgggggaggagctcgcagggaggtcgcggccgctcggacgcgcggatggagctcgccgggaggccgcggccgcctggacgcgcggatggagctcgctgggatgcctcggccggctgggcaccggggaggagcttgccgggtggccacggttggccgggcggtgggaggagcgcatagggtggtcgcggtcggctggacccgggagatcttgtactctccgaacgccgccgccgtcttgttcgccgcgaggtggtggcggtgccgccttctcccgccggcagccgatgccgtcccgctcgccgcgaggtggtggtggtgtcgccgccggtgccgccttctcccgccgacagccgatgccgtcccgctcgccgcgaggtggtggtggtgtcgccgccggtgccgccttttcccgccgacagccgatgccgtcccgctcgccgcgaggtggtggtggtgtcgccatcggtgccgccttctcccgccggcagccgatgctcactgcctgccgcccgcatcctaggagagagaggggagaagggaaaggatcctcctggatgttgcgatcttcgacttccccacgccgtggaccgtcgacgtcgccaggccgctgggcgtcaaggtggcacagcgtggaccgtcgacgtcgccaggccgctcagcgtcaaggtggcacagttctccatctccggcacgtacatcatcgcctccgcacactgcctccacgacgatcgctagaccatcgaggaccccgtgttgacacccatggggttcctgccgtcatcgttgctcgccaccgtgcggaccaggcggcgttgattggggaggcgggaaaggacagcgacgaagaggaccagatgcagaacgccgccgctagccccctcccagcctgttgcgtgcactctagctgcggcgggatgcggaacgtggccgccagcccgccgccgccagctcgagttcggcgtcgggcgagaacgacgatgacgaggaggaaaaggccaccctgtcgccacgcagcaccagcagccggctggctgacatgtgggtcccacctgatgactcagccattcaacggggtcaaagatgccacgtgggacaaaaaccgcctccgaaaccgcccgggaagtcgatttgcaacggttttgggagttgggggatatattacacccggttttgcggttgagggatgcgattcaaccaagcgcaagagatgagggaggcaaaatggacttattcctatgcaaaaccttaagctcctatttaccggcccattaaataaacgtgttaggcctgccccatgaaattcctgcagtccaggcccaggtatcggcccggccccacaggtcggtcatcttcctcgagtcgagggagacggtggtggaagcgtccagaacgagcgccaacgacgagtcgtcaccttcctcgcgaacactcgcgaacgctctcctctccatctcccgatcgccctccgcccgccgcccgcgccgcataaatggcggatccgctcgtcttcctcctcatacagaagaagaagcaacgcgctcgccaacgacgacgacgacgacgaactagggaaaagcggaccgcatcgcgcgccggtagctgacctcactcggccccgtggagatccaaaaggttttttggtggtggttgttcgtctcggattatcttctggccgcaccgcacatcgggggcagctctgctctgtgagtcccctccgatcctttttgcttcgcgtcgcattattattattatttttttgcgtaattttggttgttgtgctttatcgcgtgagttggtaggtagtatcatgagccaaacgatctgttgtttctgattagtactagtgtgtgactgattacgatggatggcaattggcatcggtgtgcattttggggacgagaaaaccgggtgattgatggaatcgaacgcgttcaaaaggatttctctgcgattagcccagattttttttttctgaaattctggcattcccgtgacagaacattggtttttggtgtttttttttttaaaaaaaatggaagaaggtagcagaatcttgtagataagtgatgggggagtgctctggtaattatttgaagtttgacagaccgaatgctccctgatgactgatgtttacatgaccagtaaccacacatgataggagcaactgataatattgttcttggtatttgtgataaacttcttatagagtactaggtgaaatgaaactaatttggtactatacactagtttaatgctaatttgttctgtggaatcgcttttccatgtttctattttgtgcatgatgtttctcgataattttagggacatttttttctaaaccatcttgcacaagacaatagtattgtgtaccaacaaatgacataaaaactgcgatagttacagaccaataaatccgcacgagagagaatagtgaataatcgactgatagcttggatagcatatagtgtgttttaatttaaaatctgatcagaaggtgcttaagaatgtagtttcgctagttcttatttatggtcagaaagtaaaacatccttttcaactaatagcttttgataatgcgaatttaggtccttcatggctacacagcatggtagtaatatatttcttatgtattttttcaggtatcagccctagaacctgttcggcaggtctaggtatttatcaaactagtatatactaaattagttagtgatgtatcctgcaaaccagtacatggatccatactattcacattacagaaatcacgctccttacgcacattatcctccttctgggtgttgggaagttagtcatccacggatggcaatggactcgtcctgtcgaccgccgagctatggaccttggcctaacatgaaccacctgcatcctccagagtttcatagctgctgcaaccacacatatcctcctggttactacagtttcaggctaccatcccctcaagaaattccaccacctcatctgtattaccatggtccttttccacaacacccgaatgcctacccttcttactttgcacgtccaccgccgtatcctgttgatcagacagcatacggctatgacaagttcaagagccattgctgtggatgcccaaaccatagttgccatggcggcgagaggagcaatattaaaattgaagaagagaggcctgaagtcaatcccgacactgagcagagggatgccagcggttctgatatagttcgacatccaaattaccaaaaccaggctatatggcttccttctggcaacatgaatgataaggagaacaaaaaaagcatggaattgccacctcagttctacaatggttggattcctgtgagtggtaagtgggttggggatgtgaagcaacaagatcaggatgatcagaaggctaaacaatttcagtggccaatattttggatgccagcaggatataatgagaaaaggcaagaagcaaaagaactgaaggaggtggatgaaagtccaaaggtttctgaagaagctcctccatcgcccaagatcaagattattcccttgtcatggtttgaaaatggtcacaatgatcagaagccatctgtgaaggatgaatctcatcataatgaaagatcaacagtgaagaagcagtctgcaggtactgagcatcaagatggcagggaaatgaagaatattccacttatgcccaagaaagaaagcgaagagaagatgcccgccagggaaaattacaagacaattccagtgatgcctaggaaagacaatgaagaaaacaaacccgctggtggtaattacaggattattcctgttatgcctgtgaaagaaagcgatgacaagaagcctgaggcaagtgtgcagagagatgaaaagaaggccagcagcactgagatggaagaagaaaatggtaaaagaagcaatgaagaatcatcaaaagcaaagaattcaaaattgcctcctgtatgtttgcgggtggatcctttgcccaggaagaaatctggaagtggttcttcaaggtctcccagtccaccaaccaggaaggatgcagatatagccaagaaggatgttaaagagatccatatgcaaaaacaggacgctaaacagtcagatccaaagaaggagagaactgtatctgaagctaaagaaaaagcacatgatgaaatgaataaagggagggcatatggcaatgaaaccgtgcaagctgcttctgtgaaacaaatgcaggaggaacaatttcccatgagtctggctgaccagaaggtgcaagctactggagtaaattttgatgctcaggaaaatgttggtgagaagaatttgcagggatctgacaaaaacacagagggtgaggcgaaaattcaaggtgagcctgcaaaagactatgatacaactcccagcattaatttctcagaagtagatgcagcagtttgtattcagtctgcataccggggatataatgtgcgaagatggcaacctttggagaaactccggatgatcaagaatgtaaatgaacagatgaaagatctgaaggagcagttgcaaggcattgaagcttcttccaagcaactgactgttaaagagcaagtggctatcaatgagactatcatgaatttactcctgaagcttgacaccattcaggtaccacctttttctgttcagattgattttatgtttctgattaaattactgtggtacaattttatggacaattgcatgttggttggttgttcaccttggtgatgctaatcgttgatacagggcttgcatccaactgtaagggaggctaggaagtctgttgctcgagagctaattagtctgcaggagaaacttgattgtttatgcaagcaatcatctggcgagtctattcacacaaatggtgaaaaagagaaaccagaggcaatggagaataattttcaaaatacagatccagtctcagcaatagaagcatctgagaaagtaagtctcacttctcccttcatagcattctataacttaggctgcgttcatttttgcatcttggctgataatttcagcggcacgtgaaacgagacgtcgttagcacattattaattaagtactccatccgtttcaggttataagacgttttgactttggtcaaagtcaaactactttaagtttgactaagtttataaacaaatatagtaatatttataataccaaattagtttcattaaataattaatttaatatattttcataataaatttgtcttgggttgaaaatgttattatttttttctacaaacttaatcaaacttaaagcattttgactttgaccaaagtcaaaacgttttataacctaaaatggaggtagtattaattattacaagcttgataaatagatttatttgattttttaaagaaacttacatattgaaagtatttagaaaaaacacaccgtttaacggttcgggaaatgtgctcatggtagacaagggagtagtttagttagagtggtagattcgaatggagccttaattttgttactgtttacatgatgacaacatgctaatttacaatgtaatttcaacaaatatttgccagcaggaaaaagctgcaggagtggatgaagaacaaggcctgtccacaatcaactccaagctgttgatgcctgatgcagtttcatcagtagtttcaatgtatacgacacaagatgcagatcctagtgatcatatagaagagtcaaatactactaaggaagaagcgcctaataatggagtaagttaatttctatctgttcctttggagggcctaattgcaaattgatatgtaacagattgatttgatttactcgtggggtatctgacgtaactcatcttcaataggggaaagttgcaacacagtgtgactgtcaaggagaaccatcaatggatgtgatgggtgatgcagctttgttgggacattccactgagcagaagcaacaaatagaagaatcaaatgccatttcaatggacaaatcgtgtgaaagagtaagttgcatttcaatctactttcttagtaaaaaactaattagcaaggcaaatgcagtcctttaattaacacacaatattttggcatgaactaatttgactcttcatgtcaataggaaaaagatgtacccccggttggaggacaggaaataccatcaggggaccacatggaaccgttacatgatgaagctttatcagagaactccaatgagctgcaacagtgcacaactagtgagagatcaagtacaatgatttctcctgctgccgctgacaacagtatgattactatggctgcaacatctgttgaaagtagtgtgtcagctgataaagtaagttgcttgtacttatttctttgatggtgaactttacccatacaacagtattgaatttgtaaaatatcaatgttgtatgccatgaatacaggtcagcccagttgaaggtcaggtgacagaagctgcagttgagcatgctcctgtggaaaaagatcagtgtgaagaaccaaacactacaattgttgattcgggggactcatcagtatccttgaagaatgaagagctgcaggatcatgatcaagctccttcaggatcctctattatgtccaattcagccgagcagccagaagaagctagcgatgtgaacatgcagcaacaagttgaaaatgtggataccacacaagatgcaaccgaagaatctgatgctacaccagagattggtatggttgatgttacctatgcagacacagaaaattatgtgcagtctcccttgctgcaaacaacatcaaaattgcaatcaacaacaggacaaaatgtcctgaaggaaccagaagcagcaaagcaatctgacgtttctggtgaatatgagtcagtacttgttggtaagcaaaatgaatccgctaacaatctgacaggagattctgcgaaagaagagccccctcttgtgggactgggaatggaagctgatactcatgaaagtgctcctagagaattgaaggatgaacctattttgccagagacggagagaagtgaattatcatgtgaacatggtgacatcacaggacatgaggattccgaaatgtatgcgccaccggaatgcgaaaccgatgtgcagaaagagagttgctgcgttgataggcgtcgtgcggacatgcaggtgccaaaggaagttgaatgcgatgagctgggagatgataatccgaaggaagatgctagtgttcagacagagaacatggcatctgaagaagcttccttggcttctgcaactcctgatggtatgaaagatgagaacaaggttgctgaagaaactacttcagattatgcgactccttatagttcaaagagtgacaatgagaacaaacttgctgaagaaaaccagaagctgaaagagatgctgcaaaaccttcttgcatctggcagcgatcagatgggagttatcacggaactgagcgagaaggtcaagacgcttgagcgtaagctggcgcgcaagaagaggccaaaggtaagggtacacagaccaaccaggcaagcaacggccaaagtccactgaagatgatctctgaagttttgagtttgtgtttatggattccatgtagctgtttgtaaccatgcctgtatgaatgtactacttgtaatgtacacatgagtgttgtggtactatgcattggagaatgtaagatcatgcctgtgttgggtccttgtaatgctcatgtagcctagtttaacacggagtatcaatgtcataagggagttgaatattttccttgtgtgctatttttctggttaagaaagctgctgctgctccatacataccatatgcacattatcatttctgctatttccactaaggccaggtatgatctgaaaccaaaagttcgtcatgtgctggcttcatgtgtcctttctcactccaatttgtctgttgcttttgatgcaggacatgtggcaggggagtgggagctgaactttgtgcaacgcatgcaggtgattgctctgcatccagtattttgccatgctttttttatctataagctgcctgatcgagctgtgatctgattatatatctcaacttgtgaaaagtaatttgggacaagtgagttagctctaataatatagcttaagaaaagaaataagtagtaaagagaatcggatgggaggtattgctcacatgacatcggaatagcgtaaaaatgccgaactgttgctcgcttgattatataatatatatatttttttggtgggagatgtaacattcttgtccagtaaattgtaagactgcagttagtcatgaatctggattctggagttaatcatgaaaaggcatatccaccttttcaggtttcgacttggaacggcgcagtatcatgataacaataggacccagtcaggtcttcgaaaagttttcagacatgcaagatagtagaaggtaaaacaaggtacagtcccgaatagtattgcgttatgctatcttactttcttccctggaacatgatgtctttgccaatgaaccaaatcatggttattgcactcatcttgtttcttagacaaatggcaagtaggttgttctctatgacaatacagaggggaataaaataaaaatatgagagagcatggcaaacatcataagatagcctgttactggaatacactcctatattgtcagcacttgatgccacgcctcccatgctcttttgctgcaaatgtgagctatgaaacactctggaccactcgagattccggtaagcatggagggcctccattagcagagcatgccagtgtcttaaacaaaatgattggccatgatctatccatctgaatatttgtctatatttatgcatcttgctctagtgctaatctttgctagatcatgttggatagcccactttgctacatgttagtacaacaactaacatgaagtttccaggaagtgtcaattgatcctgatgtttgtaagggctggtttggtttgtggcctaacttgaccttaccaacttatgttgatgccaatttttagcaagttttagcatggctaatcttgacaaggtaaaattgtgtttggattgaagctaaaataacctaagttaactattggaatggcctatttttttaggattggcaaaatttggcttcaaactatatagacactaaacactattgaaactagttgatatcacgtgtttcgccgtgggatgtgttgatgaatgcatgttatacattatagaaatgatagatgtatatgttgtaaaaaatgtgaaataatgtggagataatgatttggcattggcacactgcttgcatattgagttctaaagatacaataaaattgtaaatgatatatcataatatttaaaatactctagataataattgctagtgagtgatgatgtgacgcacttgtatgtgatttaaaataatctagataataattgctagtggatgatgatgtggcgcacctgcatgttgagttttaaaagttcgtggacataaactatatagatagtataaattgctaaatgttgataaggacagtttaggccacaaaccatactagccttaaattactgctattcctatatctgctagaaataataaggcgcatgctacttaaaaatacaaatttgaaattgcacacttctgatatatagtcaggaatgactttgggcatgtttggagagaagcagctggtaggaatctaggaagtgagaagctggtcctagcttctagttcattttgtggactcgtggattctataactataccttcttaaaatctaaattgtttgagagagttattgattttgggaaaaagctacaactaccagaaaaactcccaaccataccctttctatcatatactgtaggaactacccgaaccttccatagcagtctgatccatgaatttaacaaggaatcctaaaaggcatggtaaatatacttcattcatacaaaaatgtgatgactagtcagtctcacaagtctcaacatcgctttagaagccgaagcaagaggaggatcctatatggctaagattagtgtcactcgagacaatgacatgaggacagtgacttcaagttgatatagatatccatttaactctttgtccatgagcctctccttacggaactaatggaagtgttcttgatggccaatttcacaactgttgccattaaaaaaaaaaccctacaatttatttccccattccctttttcataggattgaaactggctgatggttgagacatcgcaaaattaaagcatgtggtgtcaatgactagtgagtggattatgccatgccaaccaaaaggaaaatgtttgccaggaatttcttccatgcgaaaaataaaatatttttaaaattatttattgcgtgtttgtactttacccattagcacaggaaatttccgcgcttaatggcttaatgcataccttacattttttctttccacgtaggttatttgggtgaaagaatgggctaatttcattaggttcttttgccagcggaggagccaccacttacaaaaatgtgcggttctatgcattcttggccgttgcattgttcttcttttttggttgatgactcgattcctcttgaaagagatttacagttctcatggtctgacattttaggtctggtctacatctgatctgactcacatgcaagctaaaaaaactgaaaaagcaccatgttagctttctcatgaaacacaaaaacgaaaggtggtatgtgcattctggcacatggcacatatacattgtagtgggcattaatttattagtggccattctcattagtgcactagcatgcctttgattattctggggcacagttgatatcctacttgtttgccaccacaagaacaacgctgcactgctgccaggttgattcagttcttaaacatgagagtaattaggtaattttctgtgttttgctacgagaaaactactaagtattttttaatatattttttcaacaatcaaactatgagtaaaaattatatcagttattaacaaataaaattaatttaccaaaccatgtacttttgtccttttatcggcccgacgtacacgaataaataagaagcttttgtcaagatggcattgaaaacctgagagattgaaaaagaaatttggtcaagatgggcattgaaaacatgagtgccgtagtgaatttcaatactgcggcaagtacgtgtggtgcccctatacaaacagtcaactcttactccaaaaacaaggataagcaaaggatttgacagggctacatgtacatttgccgcatctacaagcaatctcaaataggaatgagcagcaaacctcataggtggtcaacaatccatccaacatagtatcccctttctagagtttagacatgtggaatagtgacatgagaggagaagtagcagctacaaacgagttgatatatcgtggttttgctagactctatgttagtaggcaagtgtgctagcacatggggacaggttgtattcaccaggagtttgggaatgtcacaaacgtgtctggagtgtctgatatattgacgatttcaccctttaaaaaaaagacgtattttaacaacggctcgtgcaaaaaacttatttagaaaaatgaattgccaaatgacgtagaggtctaatgtcttatagctagaggccgtggtgcctagagtgagagttggaggccgatatcaacaagaggtcagtgctgacacgttggtattgatctttcaacatagtggtaaaagattctctaaaataggggacttgaccaggaatgagaggagcttcgacgtaaagttagagggacgtctcttccacttgtgaccagaaactctagagcttgatgaggccgcaacggcattggagttgatgaagattgacaaggacgacagtgatgtggaagaccaatgagttggtaggcgttaggaatccgacggcgctagcacttgaggcggcagtggcaccacatgatctggacaatgccagccctcgttgagctcctggtcgagtcccctacctcgctgccagatccatgggtgtttagattgggagatgattgttactgccttggataaggcatatctagggctagtttggtttgcagcctaaattggtcttaccaatatttggtaattttaatagtgtttagtgtctatttggtttgaagccaaattttgacaaaagcctagaaaaataggccatttcaatagttaatttaggctattttggcttcaatctaaatagaactttgtcttgccaagagtaaacatgcaaaaacttgtgaaaatttggcattgacaaaaattggtaaggtcaagttaagccacgaaccaaaccaatctctaatacttttgtgttagactcagtggggcccacctaatacaagtcctataaaaaaaaagcttcatatacggaaggtgttccggataagaaaagagaaacaaaatcttacttagtcactgcaaggtatactcggatcgtattcatacttggctccctagttctacttgaaaagggacgcttaagagtataaatacaagaccctaggaggagaggggatatacgaagacacgctaagacatatctaaacaatccaatacaatactgctccaaagcagactacgctggtcgtcgatcacatgtgagagctttatgactagattaggtcatcctctatattgtagtactcgtgagatattgatatataaagacagcaccagcttcggtcaataagagtagcattattacctataagttaaagcccgaacctatataaaaaatacatgtttattatcttttgtaccaaaatcatgtgtataccttagtaccaacggtcaacaatcatctcctagtgttgacctcctttcacttctatattgttccatggccgcaagggtgtccacaccaccactagcaacgaaacggaccttagcgtcatcatgtttgacgctgaaatcgtgttttatttttaaaatagttttggtgcaatcattcttaaaatatttttttcaaccaaaataagtatgcaaaagtttagacagcatcgtgacatacctatactcataccactagcaacgagacgaaccttagcgtcatcatgtctggcgctgaaatcgtgttttatttttgaaatagttttggtgcaatcattcttaaaatatttttttcaaccaaaaaaagtatgcaaaagtttagacaacatcttgacatatctatactcatccaagactgttataactatgcaactctccaaaggcacctattttgtctctttgttttgcatccaccgcatcaaggtgtgcgtgcagggaattcaaggaatacacctgcaagaatacaaactgcttgtggctcatctctttagttcatccccaaaaccaaacacaatttggtcactggatatgcttttcccaatagatatgcatctcttgtcatgtcaaaaaagatatagtacaaatcacccacattaatatatcggtatcatccaactatttctgtagttggagcgttggattcagctcaactaaatgccattctagagcctaatttaaccgcacacaaaagttgagtttatgagcgtggtgacaaccttatttgctttctatgattatcttaaaaatgattgaggtgtgaatgtgcgatatcaatttgatctgaacttgagcctgaagtaggggctcttggcttacaactttctactactatcaaatgggccacaaccgtttcgtcacacgattgaacaaaccattagaaacaattgattatatattagaaggtcatttcatatggttaatatgagctctttaatgatttgtttaatctcaaacgatttttaaggttaacggtccgttcaatgatttaacggttatagcttcttatcgtatgcctattggcttatctactatcaaaatttaaattttagaacttaattttaagttgagtttaattttttcgttgtttttaagtattattggcttttaaattactaacaacacccttataaaagtgtaactcataaattattttttattgtgtttttttggctaattagccgaagatcaaatgattgattatagacgattattggttcgttttcatttaaaagccatggtttcttccccagtttttccaactcacttctctcgtgttccgcgtgcacacttttcttaatgctaaacgatgctttttttaaaaaaagtttatatatgaaagttattttaaaaaatcatattaatatatattttttaaaaaagtaaataattaattaataataagaaaatatgtcgctctgttttccgtgcgtagagttcctaactaaaaaaacgaacataactatgtggtaaactgtaatgtacgtatccttgtaaggcagctgtacctattgcctaaacatggcgatcaacaaaataagcacgcacatagcataaagattgacaaggtagtccaataataagcattctgaagtgttgtcattgtcgaccagtcacaaactctcaatactgccaataggtttatatatttattatgcagattagacagcgaattattgtgacagcacgtacaagattatcgcggtatagatgtgttaattatgcttgagtgtatatagttttctggccttctacaagctttataattaagcaacatgcatgccatctagctgttcagttataaagcgtttatttctacccagaacaaagacaagcagcctcataattaaaacgtggtttatttattttgtatattattcaccagattattgaaatgtattatttgttccatgcattaaaaaatatttttttcaaaaataaaatttattatattaattgtatattgtttagaacactggtattaagtattgttaattttgtttatcaaaatatttaatatatctctactattatgtagataatccgtagcaataatccactcaataatctctttcaaattgagccgagtcatgtaatatgatcaatatctatggcatattttgtttgatgtcaaacataaccaaaatttgagatggtagaggtacacgatagtgtttttatatgatttttatagaaactaggaaggtagcccgcgcatatgcgcgggtacttatttaatattgcttaatctttttattataaatgtttatatgcagattatattttcaaaatagatcttcactctattttaaacatgctttagttattatctaattatgacatattacattaaaccatacaaccttgaatttattatatgaatttatgagaacaacatgtgtcacgataataaaacaataagagatatgctcgatagaaggcactatgccaaagaagatgatgatctcacatgtcttttgtgcaatgcacatcacagagaaataaggcttcatcttttcttcacttgacctttcagtgtcagatgctagcaacacttaggaattcagtggatcataatttggagttctttcagatgatcaccctagaaaaactcaagtttgctcagaggggcttcctggaggttttctttttggcagcatggcacatttggaagcagtggaatggtttaatcttccagaacattcagccctccttccaagttggagatctctttttgtgaaggaaattcttctgcatatgtgcagaataaaggatcccttaaaacaaattgtttctgattggttacaaactttatatttttgtttggtttcttactctaactttgtaaatattttttgagttatataaaattacactgctgggcaaagaactggcagtttttctagtcaaaaaaaataaaacaataatggaataatgtagttctttcatatctatttgtactatatgtgattttttttaacctgaataaagtattttttttaaataccactacgataaaatctccaaaggaacaatataccatattgttggttatattttgacaaatatctataattttgcggcttgtgtttttcaacgcctattcttcataatgacagaagacacctttactaattaatttggagaatgaatctattttcccaaacttatttataataactaattgattgaagtatacttcattgtcacatcaatagagtgcatgacatacaatcatcaaattatgcctgatatgttggaattcctcaactataagaaaatatatcatgagtagtatattgcgtatgttatttgattgttcatttgttatgaaaactatttgacaaagagaaaaacatacatatatgaccataaatctcatgatggactaaatggttgttttatagcaagatcattggcttgaaatattgtcataattatttttttacatttatgtaacatttatgttgcccaattatcatatagttctaaaaattcaaaaaaaatattaatctcaaacatattaaattaaatcatatatctacttaaaaatacacaactaatttgtattgttttcaattattttacatatgtagctttaaattagcattatattatcatcaagtgttatttgacacctaaaatatgatgtaaaattatttaaaataggaaaagtacgaattaccccctaactattacggtcgaccgaattaccgcataaacccgaaaactagacatttttcaccctcaattattaataccggatgaattacccccccccccctcccaaaaaaaaaatcaagccgaagtggttttggtcctacgtggtagtccagtctgcattttaaaaataaaatatgtggggcccacttgtcacactctctaccctctcaatccctcctctctcacctctctctctccctctcttcttcaatcccattccccagcctcactcttcttcctcccattgctgctggggccggccggcaagcacgccgtcgcccgctgctcttcctctcctccttcgtccattccccagctcttgcttgcttgattgatccacctcgttgtctcgtcgggagagaggcattggtggtggggattgattaagaaccgtggtgggacggcacgctatggtacatagagctgccgccgcatttgttgggcgagttcttgatggcgggggcatagccgaacctggccattgaggaccagcacaggtgctcgccttcggcagctgcaactctcatcacgcgacgacgatatgcaacggaaatgatggagatgacaacctccgctggaatgcgcatgtggctaccgagacagccgaggaggaaccgcctccgccgcttgagctcccttgccccgccgctgtcatcctattcacgcactggtgcaggtcgaggagaagccacgcgaccgtcaaggaggcgcccaccggcggtgggcgaggaggagccgcctccgccgctcgttgcccctagacttgccgattgatagatgtggagggagaagaaagagagagatgatgaaggggtgaggaagagatatgatatatgggtcccactattttttttaagaaaatgctaactgaattgccacgcaggatcaaaaccactccgcgttgagtcggggtagggggagggttaattcgtccggtattaatagttgagggtgaaatatgtctggttttcgggtttatgagggtaattcggtctaccgtaatagttcaagggataattcattattttttcaaatattattataacattatttattatatgtcgacctcatgtgttatgatgtatttatgaacatagacatcaatagtttatttaattggagggtccaactggatcacaaattagatatatgattttaaaataatttatagataggatgtttaaagagcattgataggatattttatttttatattgtaaacgatctagtttaatgatgtatatttgcataagtttatagagtaatatattttattttaaaatagtagaatatcatattttatggagcatcgatttcttttcagtggcactacgtacctactttaattatgttttttttacttattaatcgcttttatctaagttggtatacatgttttcctttattccggtgaacggggagataagattcattgtttcttctccgtacgtacgtaagtatcggattacttacgttttgtttctttgtccggcccacaatatagatgtgaaagtacttttttaaaaaaggacatctaatctaatggtctataatattgggtcaccaatttaaataaaaatcgacggtgagattaaacagtgccatgtggcggtctaggagtatttgtagaaacgctatgtggcagtttaagagcgtttctaggaagtttaatggacttttagtatataatagatagatagatagatagatagatagatagatagatagatagatagatagatagatagatagatagatagatagatagatttcatgttgtttcagttgagaaagttaatttctagaatttccaaagttggtaaaaaaagtatttgagacatgttgtctattatcttgtcaaattttggtagtgccaaatactgtatctattatgactaaaaatagtagtaaaccaaacatgtacacatatcataatgagatatggtgcactcactttgattccaacagtagacttagttacccttcgtttatactacataaaaagaattatttattcataaaaggggtagcatttatttagcaagggcaaacaaaaaagaggctctgtagaattacgtataaattttaaaacaacttaaacgacttacatttggaactattgggagtatctatactactataaaagatattagtagtggtggttattctgtcaccatcactatttgtattttctttttaaaattagtctttgttatttttaaatattatacaatagtctaatatttatttgaatcaaatggacatattatgtatattcaaataagcaaacatgtctataacaacttattattattattattattattattattattattattattattattattgagttaattgtactttggttcaccttttattaccaaagtttcactttgagccaccctctaactaatattgtcactttagactaggtaaaattacctttgttacggtttggaccaccccaagttacttttctagttgtatctaccatctaatcttgcgaagaatagtctacatgtaagtcgggaagattatcggtttatgggtgccgatgtggttaaagtcatttatgtgctcgaaaaagtttttgggtggttcaaaatgaaacaaaggcaaattaatctagtccaaagtgaaaagatggtttaaagggtagttcaaagtaaaactttagtgataaaaggtggccctaaacacaatttactcttattattttacccatatcaaagcatgtatgggtattttgctagtttatcgaagaacagtgatcaacaaacccatagccacttgcccaccgacctttctcgatttcttataccgtcgaaccagtttaaagaccttggctgaatcacaatacaataatcccaaacaagaagttcactaatcacgaaaaggcactttaatggacattattagcaagccaatggtttcctttagcatcgcccacatggacagcaacaaagttgctctccacaattaattaagcatgcatgtatgagtgatcaccctgcactttctccatttctaaatatacgatgtcgttgactcttacctgtcatgtggtttgatcgttcatcttatttaaaaaattatcgttgtcgacgtttgatatcgcaattctggtatttgcatggtatgggaatcgtcggtgctaggatatacgcaagactgaggtaaaagggatggagacagggatttttatacaggttcgggcccctgaacggtcaggtaataaccctacatcctgttggccgaagccggtattgctcttattcatgataatcacaccagtacaatatttgaggtagcctatctaactgttgtcgatatggcggtctgacgatctgactcgtagtcgacaacagggtagccttcctcctcgaatccgtgcccggcgagatcagagatagcgctttcgtctctcctgacagtatccggagacaccgtagggtactagccgtgcttatccctgaagtgatatccgacggcgtgtcttgacgtatgtaggcttctatgttgattgtgttgggtgttgatcctgtcgggtgttgatcccgttgggtgttgattgtcttgtccccccctctcctcctagggggccctatatttatacccataggtgtccccttctccaagtagaactagggaaaccaatatggatacaatccgagtagtccttatcgtttccatgtagaactctagttatctttccttatccggaactccctcgaggtcagtttccgtataagacatggtatgtagtggatcctgccgagatttagtcaactactattaggtatgtggtatccataaccctgacagtagcccccgacttcgatgcaaatgaacgagttcatattctcaaccgcagactttggaggaactgttatcgagctcacgtgaccgttctcggtgagtttagagataacgttagacttcctttatcagcctcgtgcgggcaccgaaagggtttgtctaagtcaatctctgatgtcgaccgagaaagtacagagcgtacgactaagtctcccgtcttgctgcaatcgagaatttggattgaagtcatgaaattttatctcagcgggtacaccatctcttcattccgtattccttgtcgaaatccagcaaccgttctcgagtgatcgagaaggcgtagagtctgcgacggagccttgtcgacatttgtcatactcgccttagtcgatcttggtgtagaaccatagagacatggagtcttcgataatgtcgaatagaattttcctgaaatcaatactcagaaaagaatattagatagaaatagcccccgagcgaatgctcaaagggtgacatgctataatatgacagactagtgaattgaatgtacagaccagtgctttgtatatgagcgtcttctctcttaccaactacgatcagtcagtttgtagagtcatacactctccctagcccccagccttgtcgttggagaatcgttctcagaagataaggctcttggacctttgacctgcctcggttgaacaagcacttatcctagcccccagctgtgaagttggaaaatccatttccgattacacggcttggttaatacgtacggcgagaactcttacacgaccagatcttacatggtctttcatctctgaaggatccgacaaggccttatcggctctgggcgtccccagctgaagttccctcaggttcctcggaggccttgtcaagacggcgtaaagggacagtaggataggtttcaacgctaggtgtcatctgggtaagggatctctgggtaaaacacttggcgatcttgtgcacctgatatcaactttgttgaagcaggggaatgggagaatcgctacatcgctggtcgaggaccatgcaatagttgtaactcgaccacttaaagtggaagtagtgggagaatcgctacaccgctggtcgagaaccaggcagtagtctaaactcgaccacttgaagtggaaatagtgggagaatcgctacaccgctggtcgagaaccaggtagtagtcgtaactcaaccactagaagtaaatgtacgagagatcgctatgattgactggttgagaaccagtgagtaggtgtctctcgatcatttgaagtcgtggtgcgaggaccgctgcgttattgctgtagtcgtacctcgaccatctgaggttgtcgtgcgagagattgctacgtgctggttggagaaccagcgaacgtgtagaattatctctcgaacaccaatggaggcgctagagttggtttatgtgcatctcatatggccagcatgactcacacacccaacttgtagcatatccggatgtccgttcgcaatcatgtcgggtgatcaagccgacggtgttcgcgaggaattatccgttaacaaccttttctcgagtagtccagccatggccggtgctatgagataggtcgtcggtcttcgttggtaggtcgggtgcgataactccgcatttgtcgagaatgttctcgataatagagtgtactcgaccacaaccttctcgagtgctcaattgttcctgaaaaatattttctagaagacaaagacatatagtagataatatcgagtatgtactggacataacgagcagatgtaaatatcagatattatgtagaccgtaaacaagcatgatttatatagaagaagacagagcgagcccccagtgttagatcgtagtcgatttaacatcggggacacccgcgcaacagatattgtataaaaaacatgctctaggtaaacataacaaattattgatctgacaatactgtataagtctgaaaaataggtacaataaattgtatataaaatattgcgtatatgccggatatatctacggaattagtagactaatttaaaaaattaatctactaattaacttttgttgccggtatgtacatgtagtagattttgaaccaatccatacagtcgtcctgtataagatactcctgtacacgtgaaaaaactccctttgatccagctctgacacgtgcagttttgccgtcaacaattgccgatcagagctctgtttctggtccgagtaggaattagaccaaaaaatacagcttggtatgtgtcctgatgacaaccggaatcggttgaccctgacatctagttcctctgccatagatcgtcgggatggtcggcgtgctgcaccatggttgtctgtcttgagagtagaatttacacggcaacgaaggtcttgagacttggacgatctcgacagattgaatttttagcgacggtggttccgatctcgtcgggagacatactccggtcgggttggatcttcccgcagctgaagtcgtcgagtagcttgttgttcgagaatccatcttttgaacccatctcgtcgaaatcctgaagcaccaaaatccccttacctggcgcgccgctgtcgacgtttgatgtcgcaattctggtatttgcatggtatggggatcgtcggtgctaggatatacgcaagactgaggtaaaagggatggagacagggatttttatacaggttcgggcccctgaacggtcaggtaataaccctacatcctgttggccgaagtcggtattgctcttattcatgataatcacaccagtacaatatttggggtagcctatctaactgttgtcgacatggcggtctgacgatctgactcgtagtcgacaacagggtagccttcctcctcgaatccgtgcccagcgaggtcagagatagcgctttcatctctcctgacagtatccggagacaccgtagggtactagccgtgcttatccctgaagtcgatatccggcggcgtgtcttggcgtatgtaggcttctttgttgattgtgttgggtgttgatcgtgtcgggtgttgatcccgttgggtgttgattgtcttgtcccccttctcctcctagggggcctgtatttatacccataggtgtccacttgtccaagtagaactagagaaaccaatatggatacaatccaagtagtccttgtcgtttccatgtagaactctggttgtctttccttatccggaactccctcgaggtcagtttccgtataagacatggtatgtagtggatcctgccgagatttagttaactactattagatatgtggtatccataaccctgacaatcgtaactatgaaaacatgttatattcaaatatttactaatgaaaaatcacaacaaaataaattatatgtacataattctttctaataataaaaaaaatgatcaaacgtcacggataaatgccaacgacgatggaggagagaagaggagaggtagtagcagctatactactgcacaccttccatcatgaccttccaacaaaggcagccgaagcagcaaaggcagagcaaagcgtgcatcggatagggatgggtcatgagatatatacaaacaattttaatttgttgcgacctgtgggtgagtgatgcacagccagacacacacacacacagagacatagacatagagatggttgctggttaggtaggtgaggccccatgcgtgcatgcttgctccaccaatcataaaataggcctcatccaacaccactagtcacgattgcgccattgtttgtttggttggtctgctcgatcatatctttgtagttgtaggcctttggaacatcaaatccatgcatagcaccccctccctgttccaaatcgatcgttaggatactcgacatatcaggcccggcagaagttttttcttaaagaaaatttcagggacgtcttttgggtttttttaagtaccatcctataattatatgaacagtcctatttctttaattctgagaaacgccaatcgattttctggctagttccacaaggtgatgagctagtcggcctgggtttgaaacctcacaacttctaattatttgatattaggtcatccctaatattcgcgtcttttttatttctttagttccgatgaatctaatttattatactatatccgagagtatgtgtagtaggaattttatagagatatagcatattaaaataaattaattggtaaagataacttagagaagttttgaataaaatatttttatattcctgaaaatcttagttagatttaaatatataaaaacaatctactacccaactacgaatgtatcgataatgcctcgtattttaaatacaattgaagttgcataaaaccttagatattaggatggtgacaaataaccctattttattgtggttctaaagttttgcaaacgttcagtaaatatttacttaatattttaaaattacagtgtatatgaaacttgtagttgttgaattcttcattaaggtcgttggtttaagtctttactactttaaaaaaatattgtctcaaacatgttgaaaccaattggaattttaataaaggtgagattttatgaagcattttcacaataaaacttataggtatgtgccacaagacataatacatttggggttttaggaaatattgatcataaaacgtcacgttttatgatatttatttgttttaagtgttgatgagagttcctgagagaaaatttgattggagacacaactcatgattatagcttaatccccaaagttttgtggtacaagtccatcggtatatttttctccttggcatatagacgagacatcttccctagggtaacaatgtggtttttttttcatctatcctagggccatgatgttgtcgcattcggcacttctcccttgactctgtgttcttttaaggggttaggaacccttctcctagacatgtaaaatgaaacagtggattagcatatatgtactagttaaaaagtcaaaaatgaattaatatgacttggctatatatattttttaaaagacaccatttagtagtttggaaagcgcgcgtgtgaaaaagagagcatagaagttgaaaagggggagaaaagaacacaccttagttagactcttgaaattttacatgtcttagttattcctgtaaatggtaaaaaggaataactaaccctaaaccataagcgtgcagaaatttcccatcttcgaacctctcactttccacggacgtgtttcccgaactgttaaatggtggaggtttcttaaaaatatataggaaagttgctttaaaaaaatatattaatctattttttaagttctctactccctccatctcgtaataagtttatttttatctcctttcatttgtcccaaaataagtttattgttagaataatatcatataatcaacttgaatatgaatgagactttgtagatatgtgttatactattagaagtatatatttattttttttagaatttttcgtgatatttactaatttatattcacagagtatgcacgaaaaatttcagtgcacagtatatattcctcggatctaaacctgttggttcaaacacatgaacaactgctacatgacctccctagtttttggcaataactggttatcttcatcattttgagcaatagcgtcgagttttcagatttttcatctcaccacaggaataattttagagggcatagactcttagcaacccaaagaagatatcgcgtattacataatgcatacatcatacatgcatggggagcgtatatcaaaagtaacatgcatttttttctatatttaataaaaatgtcactaaaggctaaaatctaacatgttgtagtctatttatatttatcactaatgtagaaaaaattttgatgacctatttctatattactttaaatgatagtagtagtggttaaacaacatatactgacatgtaaggctacaggtataaggttcttacaatatatgtgaacgttgcgactttcattatatgcctaatcgactaagtatgctataaacttatactttttatttttctttcatctcttgtacatccgtggtaatgcatggacttttaacttagtgtaaaaaacctttctactcgttagaagtctcgacttagtccttattctttcaagctacttcactgaattattgtcgtgcattattttatccacttcctagaaaacattttttttccaaaaaaaacgtctacttcatttttaaatatattttccaatacagtaatatgttgaatgctctattttcaaacagaaaaaaattattttattttttgagcataagaagctgaaaagaaaattgtctagggaccaaaatgccccttccttctcttcttcttccctcacctcctccccctctttccctctcagctccctccatctctctctcccctctctctctctctctctctctctctgatctgcagagccggagcccggaggcgcggctgcggctgccaagcctcctcctcctcctccagcgcgcggccagcgagcagcctcggaggccaccgccgccgcctcctcgcccggacggcgggggagcgggcggtgctccgtccagcggagcgagcccccccaatcttggccggaatcggattgaaggtatccattcttcttctacactgtagctatctctctctctcgtcctcctcctccgcctccggttcgtggggcggccggggcgcagatgggagatcccgtccggaccggacctggattggttctttcttccctccaatttgtttcttgtcgtttggtttggatttctttctctttgagccagtaggagtttgtttcatggagaaatgacgcattttgttcggtttcgctgcccttttcaagaaacttgtgttcaggtttggtgttgtcactctcgaagttttcttgtgaaattcatttattttttatttattttattttttgcgattagtgaacccgccaagaaatcagacgatcatcacaataatcctttttcttctaaagaatactactttttttcgctgtccgtccgcattccctttctcttttttttttttcatcactgacgacagcggcggcggcgattgggttcttgctctccggcgaatatccatcctgacatggattgatacgttttcttgccaataaacctttgcttggattgagagttctcttttgggggttcttctttctgtaagcaacctaatccgaatcaacgggcattccagtttttccagtttcttgcggatttgtttactgcttagtggagtggatgcagttgaaattaatttactgctataaaaaccataggctatccctttcacctatctggcatttacattctgcttccttgagctcatggaggcaatgtataagatgtatatatactcaacgctctgaaaaattgatgttgtgttgaatattgagtaactctggtatctagattagatgttaccatgtggctgatgcatgaacatttaatttcatcacttgcacatgcaggatcttgcgttagttactgtgctgttcgctggatgctggcaatggggtcagaggagtgggagttgtatccatcttccttcattggtgctcaggtcatagattatgggcatgtttctggagacatggatgatgatcagagtggagacttggccgtgtcgatggacgccgttctccctgatgatcttttagaaaaggtcctctccttcttgcctgttgcaagtgtcataagatctggatctgtttgcaagagatggcatgagattgtgcatgcccggaggcagacatggagcaaaatggtgcctcagaagccttggtacttcatgtttacctgcagcgaggaagcggtctcggggttcacctatgacccgagcctgcgtaagtggtatggattcgacttcccttgcattgagaagaccacctggtcgatttcctcatcgtccgggttggtgtgtctgatggacagtgaggataggagccgcatcatcgtgtgcaacccaataactaaggactggaagaggcttgttgatgctcctggtggcaagtcggctgattacagtgctctcgccatttctgtgaccaggacctctcatcagtacatggtggctgttgcaaggtgcaaccaggtgccatcagagtattatcaatgggagttcaccatccatttgtacgagtcagagataaatacatgggtgtctcccttcactgaactattgattggatggcgaggaggtgatgagtgcgtgatctgtgatggggtcctctactatctggtgtactcaacaggagttttggtgaataacaacgagcatcgccattgtcttctcatgtatgacctatctaccaggcctactcacacttctttgatgagcatggctataccagtgccgtgccctcttacatgtggccgtttgatgaacctcaatgagaggcttgtcttggttgggggcattggcaagcaagataggcctggtatcatcaagggaattggcatctgggagctccggaacaaggagtggcatgaggttgctcgaatgcctcacaagtttttccaaggatttggcgagttcgatgatgtttttgcaagctgtggggcggatgaccttatctatattcagagctatgggtcaccggccctcctcacatttgaattaaaccagaagctgtggaaatggtcactgaagagccctgtgacgaagaggtttcctctgcagctgtttactggtttctcttttgagcctaggctggacattgcttcctagttttattttgtttcacttccacgggaattcttgcattatttgcctggtttggagttaccaagtgaagagatgatgtcattggaagccattcgagaaagtgtttcaggttttatagatctattctatttattgctgagtatatcttctaattgaaagggcgtctaaacttccctgtttcatttttgttgatttgatggttggataatagagggagggatgatgccatacacaagaacaattcttgctgaattgtgttttctttattcttatgttgcctgcaaacaaagtgccacttcagatgtcccaaacctaaaagattgttactttcttgatttatagtagtcatttgcgtttggggtccccgctgctactgatttatgttttgttttattacgacaccactacatgcaaacatctgaacttgaagcagagtcctttgttgttgagtcagtacttgaagcagagtccttgctctgcttgccgtataaccattgatggacagcagagctgttaaggttgccttctcttttagtccaatgcacaaaatcaatctgtccatcactcttattagcacttacataatcagaatttttggaaatgcagatagttaactgaaaataaaaacatggatatcaaaccatgccatgtaaatcgcgaagagctggtttattgaaatattaggcaaacatttggtgatctctggttttactgtactcattgtttatccctaatgttcttatacttatctcctctgtcaagttcctttgatgctatttgaagctcatgtttatccataatgttcttctacttatgtcctatagtactaaactactaactgctaaactgtaccatactttatcccaattactcatacagcattgtgctgttcatgtagtgccagaatccttgcctgcttctgatgcagcatctgtgtcatactacatagcaatggcatgtgattgtgcaaagacaggtaaaggagcatgcatgctgcatcagggactcccggactcagagtctctctttggttttggatggatacgttaacactattttcctcatgcctgaactctctgtacttgcttgatagtaccaccaatcctaaaaagcagcatctccctttttatattttcttgcctgctgtcactgctcccaaatgttgcttaaagcctgtaaagccacaccctctgctctgcaagtgaaggacacatattgtttcagatgtccagctgtcaatgatgtatgttgtgtatgccttcagagaatcagaaagagaccctttcagccagccagcaggtgagctcagtgatgtggtaccagcagggttgcattgttgcaagcatggggcaatttcttctgatgagcatatatattgatgttgaagggtggtgtatgatatcttggggacagtttctaccagtctgttatactactagaaaaggtagtaaatgtgggtgtgtatgtaattgtcactttgcaaaggtgtcctccaaatgcatttgctgtgcaagtattgtccaatgctgtacctgaacttgttgagctttgtgctatagtgatttttattagcagaaagcatggtgttctgtcaaaggatatcccacaacttgaacatgatcagtgcttagctaatgtacttggagaatgccagtgtttttgtctctttgcaacatagtataaaaagaggtaaacatgaaatctatggcagggagctgtttctccaagccagaacagacacatcacacatactagtatactactgataggagtagaatcatatttttaaagaaacaaaacaagattcacctgcccagtctttgttaattcttgtggttagaagttggagcaaatgcatctgtctggtttgacatcttcattttgtcataatctgttagtagtcagctattactaccgttgctaattaaccctcaaaaacgtcagcgtgcactaaacgagttagagcatgtttggacatatctaacgcctaagataagttcagggaataaaaaaaaaagttgagagacctagatgatgcacccgcataaatttcagaacagctagggcacttcattggaaagtctaaaatttaaaattaattacaccttaaacaaataagtaagccgtaaacacaaaaacatatccgagggagcttctaacaattattggttttttcaaaatctttagcctcgtaaatagttcatattgttatatggattgtaagaaactttaatcatacaatctagaaaataaactagcagtagaagctcaacttttcacattctcactaatctagaccagccacctcggctgcttattactataatcttaagggcccctttgaatcaaaggatttatgtaggaattttataggatttcctatttgcccctttgattcaaaggattgaagctttccaaatcctatgaaattcctatggaatgacacattacatgtagattttagaggaaatttagcaagagctctaacctcttggaaaatttcctttgagtctctctctcatccgattcctacgtttttcctgcgctccaatcaaacgaccattcctgtgttttgcaatcctctattttacacttcaatttctatcagaatcctatgtttttcctattcctctgttttttctaccctgcaattcaaatgggccctaaaggtcctaagcactgatttgggacgaccagagatgaacggagataagcgggttgggggtactgtacctcttccagctttgcattgtagcagtttgatcagagataatgttgagagagagagggagggtaaaaaccatgagataatcgtgtgctgttaggttatgggggggagaagtgggaggcaggacacgagtgtttgttgtttagtgagcgggggtacacaagtcgttggtttctgcggcgttgcagtttgtgatgtcgacgaggaggagtaatacttgtcctcttcttgtccctcctctgtccatatccatccatccatccatccatctatccatccttgcaaacgcaatgtgcaatactccatgcagctgcgactgctgaggattggattctctgcaacaagatggatgccataggaatggatgtcatgatactacacagtactacttcataatttataaagttattactacatcatattatatatactctattcttatcaatttgagcaggaaaagcccaaatatcaaatcaaataaaaccattgaaatactagtatactttccaagagcgcttactattcattattcgtccaagaagggcctgataaatatattttgcttttgtaggttccaatgcattggtgaagcatcaagcatgcaatgctagttctcaaaaagataaaattatgcaatgttcagatcaattaataaaaccataatatactaagcatcagcaagtacagagattgaataccaacaccaccaaacaaacacatttgacaatctactgctgctaacacttttccattgctgaatcagaactctgaaataaaattcattttcaacggccctggctggcaaagtggcaactctgaagactcttgctctcactagtcactccccccttctctgctgcacctgtctgcacattgctttggttctgctgctgctgctgctgcgacgacgacttctcccatctcgtgcgctgcatcggcaaccatgcacgacgtctccatcaatgccatgccaatggagctcgctgcgaggaggaagaaagaagaagcccaagaagaagacttttgttggctactccgccgcgagatttcaatgcgagatcgtctctcagctctcagctggtgggggagtggcagaggccgcagaggcagtggtggtgacggtgatggggcgccatgacgagatgttacactcctgtgctactagtactcctgtgacgagtgagtgacactagtgttgtgaagttgctgctgcctgcctgtagcttgctggccttcttgggttttgcttctgcctgggggctcgtgtttccatatggcttctttgcaatgcacagcttgttgggtaggatcagcctcctatgcagtcaaagtcgtgtgactctatcactaatacgtgggtccgatgattattgggctcatatgtcagtgacaaaagcaccgtgtatttaaccgtagaggatctcaatcctgttgggttgggtatgggtatgcctactactattgaaccgaaagctctcttcatccagtgcagattgtctgcagtattgcagcaactgtcgctgatatgtgagaccggttccacctgtcactcaccgctaaagcatgatctgtgtccctcttcatcctccgggagtgttcaccacaagtgaagtgatgatgctatcagctgtgttcatgaatataatttttctaagcatttaatatctctactattataaaaaaataaagatgcttccgttagaattttgatacgttatccatgtttgaatcggttttaattttatgtttatgccacatccttttctcttttttttcttacgccagagtatccctcttatccgagaggcgcgcgaattaattggacctacaccttttcacgtaccccttgccacacgcaacgatcgggcccgcgcccgagtctgtttccatacatgcctttgtgtggcgccgtgattgggcccgcgacgccctcgcaggcgcaatttgcccttgccacatgtccgatcgggactgcgtcgtcctcgctcacgattttaaaattgaaggtgttattgttgaaactatgatacgtcgtctgtatctgattcctgtcacgcgtagcattcattgcagagtcatgattcacgagtgatgtggataccaagtaaatgaaactcacagagtccgtgtgaatatcatgtatgtcgttgcctagatcatccaattctattcgtattatacgtcacgattcctatgtcatgttagcatgatttcaaatcaatcttcacacatgctcatacatactactatggataccattataataatccataacaatcagttttacttttgaaaagaacatgccaactgaaaataaaggataatcgacattgctgatttcgtctgtcatcaattcctgcccaacttgagataaagctagacgataaatcgagctcgtgtttgaaggcctcattgtttggcttatgcttattcttataagacaaattttaaattttagaactttattttgaattggaccttttagtttgttatcgaattttattttacaacatttgcttttgagtcactaaaaacatgtatataaaatatttacacataaatattcttttatttggtaataagttattcggataagcacatgaataaacgatacaatgggatgtgtttatttatccacgggcacatatgtacaaattaaattggctctacccattgcaacacaccggcatcttttatagtttatctataaatataagcattaaagaatattaagtgccaccttaatcatatcacgttacaatttcttcttatctttaccccagccaacttcttaccatatccatccctcactgagggacagcaaggtctttttctctccgttctatatctctctaaatattgcatctgtcccaaaataagttcagttatcttccttctacctaccctggtccacaaaatcttcaatacccttgattactcatcaccaacactacttcctctttatcatattataagtcattttactttttctcaagtcaaactttatagagaaatatagtactattttcaacataaaaaaaacatattaccaaaatatatagttagtgttagatttaataaaattaatttgatattttagatgttgctaaacttttttataaacttgatcaaacttaataaattttgactaggaaaaaagtcaaacgatttataatatgaaacggagaaagtagaatataacaacctagaatcggatgttggacagatcctctgtccagatttatattattataatgagtattcgctctatcttaatttgcattctaagatctaaacataaatttattttggggcaaaggtagtaatattgtaagaaattttcttatagaaagttgtgtaaaaatcacattaaagtcaaaagtttttttagagaaattttcttaaaattctccttagagatgtttttttttaaaaaaataggacataattttaggttgtcgctcggatgaagattaagtgtgcacataaaatgaaatatctattagcaattaagcatcctcatgagcatcgccggcctccttcggaacaatctcatcctgataaaccacggaatgcatgaactttccatggttactttagcagataacacagtagtcggcaaagggagatcaaggggaaatagtgaaccccccccccccctcccccctcttgtttgttctgacctaggaaccgtgctcgccgcaggtggaggtggggtacatcacgagcaagcggacctgaatgctaaatgacacttcctccgtactttaatgtatgacgccgttgactttttaacaaacgtttgaccttttgtcttattcaaaaaatttatgtaaatataatttattttattgtgacttaatttatcatcaaatgttctatttttatatttgcatataaattttgaataagacgagtggtcaaacgttggttaaaaagtcaacggtatcatacattaaaatacagatgaagtacatgaattaaatggtgtatcaattctataaattggatataaattggatatataaataaataaatcagcaaaaatcttttatttaagatagaagaaacttttcttccatctaaaataaaagaatgtacggcctcctcgccaacttcaagaacatcttcgacaagttcaccttcaaggattcctctgctgccgccaaggtatacagtagacaaacagattggtataagatttatctcctacgcagcaagtttggctgccctgtgtggagatatttgacaagtggattggtattttctgataggattacgagaagaaagatgaggctggcactgatgcggcaaacaaagctgcaggatctgattctgacgacgatgacaagcaggggacacggcaaaaagaaggaatatttgaaagatatgtgttttgcttatccgtttgtttgcaatggctaaaatgtggattcgtcaatcatccggtcattagaatttaaattagaatttaaattagagtaaagtccatcaccggtccctaaacttgtaccgctatgttatcccggtccctaaactcgcaaatcgatcgttcaggtcctcaaacttgttcgattgtgtcatcccggtccctaaacttgcagatcagtcgtttaggtccaccaacttattcagttgtgtcaccccggtccttaacttggatttgaatatctagatcaaataggacggtctaaagactttatatttaaaaataattcataactttttcatgtgaactctaatgaagacaaactttatatcaaacttgtagccctcgacacgatctacaactttgtagttgaattttttgttattttaagtcattttttgtccaaaaatataatattaaaattaaaatttcaaaatctataaacatgcaacaatattttgggaccctaaacagttttaattcaaaaacttttcaactacaaagttatgatataaagttttcaattttgatataaagtttgtcttcattagaattcacatgaaaaagttatgaattattttttgatataaaatttttagaccgtcctatttagggaccggggtgacacaactgaacaagttggaggacctaaacgagtgatttgcaagtttagggaccggaataacacaatcgaacaagtttgaggaactgaacggtcgatttgcgagtttagagaccaggatgacacaacggtacaagtttagggaccggtgatggactttactctttaaattatatatttgaaagctatgtgttttgcttatccgtttaagaacggtttcgctcaattggtaaataaatagttgatggttcttctatatagtttacctgcaggtcaatcagaaataagcacaagttaacagaactaagtattaaatggttcccgtgcataatatgttttttcccaaattaattctgatgatcccctatatgatgtgaaacaatgtctatcaactttacgttttagttagcgaataatgcatatttactgctctcttgacaatttggtttatgctgcttgctcttatttgggagtttgatttcacgccatttatggttctgatcgttacaatttctgaatgatggtatatgatatccttgttccctccatacctactatatctcataatacttcagtactaagtagttcattttcttgattttcactccaaccattttccaccacaaacaggtaccataatgactatatctaagcatcgagtaaagccttctccaatacctgacagctggaagttggctgaaaattttacaactgcagttgtccttggtggatagttggcaaagatgcatgttatattcttcagagctgcatacaagtccaactttttcacctgtaagaagcacaaaaatggtaagaaatgcttccctgttattgattcttatatttgcattgaaacttaatgttcaattgtctttcagaggatctttcacatcgaaagccttcagaagatagcccaagacaactaccaaaagcttgcatctgttgtacatcttaaatttagcaacatcaggcaagctcttagctttgttacatggtcttgcagctggtcatatacagcaaatttcctcactgattttcgcatggtcccctgcattggcctcgtttctagctgaccagaccacccacaagaaggaacctatttggttctgcttttcctctgggagacaacagataaaagccaacactcttccctgagatgaggggcaacaatgctagatggatgtcttccaaaaatagattttgctagcagtctagcagcagttaatagctatacttccttcttaataaaccctgttatgtatataagtttctatgatcaattagtttactcatttcaagtttggggtttggtcattcaattagagaacaactatgttaacaagtgtgtaattatttataaactgtttgtgattatgctattaacctttgtggtcatatttttaattagtatggcacatcgaatgcttttgttattgaccagctgaataatgtttataggttttcatgaacaattaattacataaaatttgtccgtttgaagtttggtgtcactttaataacacactcaattatgtactatctatcttttgaaaaatttcgttttaattaagtggagtaaaggatggccacccaatccataatagcaactaattcgcgtttaaagaaatttgtgcatgtttgcttgcgattaaaagatcctggaactacattgtctcatatcacacttaattgtatgcaaaatgaccatagggcatgcatacacgttctctagtaattaccaggctgtcattgctttggtagctcttcctcatcaaaccaccttgggggatcatatccatgaccacctgtttgtttattgtaaaagaaatttaataaatatgatatgatgcaggtgcagactgcgactgtcgaagaaatcaaaagaactatgaaccaacgaaaaaacctacataccaagaggattacagcggcatagacgccaagctgtcaagattgtaccctttgcaacaccgtattttttgtatgcttgcatagagtactcactgcaagttggcacataacggcagcttgagggtagtaagggtgatatttctcctgttcacataaaggagagcaagctatagagatatagttgatatcaaaaggcaagggcgcaaggccaatgattgctgcacataaatacaagggtttaagatgaaaacagcaagaatgaactcacttttgtaaaattttagcatggatagtgccacgttgactcccaagtcattgacttcctcttcttaaaatcacaaaaacacaaaatgcactcgtatcgatcagttctatagttttactcagaaaaaaaacacaagtttgtcttccattaaaataaagcccaatctgcaatctcctaatcccataatgaattgcttagacttagtcctttacttacgtacgagatgcatggattgggaaatttgtgccataatattccatagcaggctatgtacattttcctaaactgagttctgtgatgactcattatgaacttatgcagcacattttgtagacattatgcacagccattcgcagtgtgtgaaagttcaaaacttacacacactcttgtaccttgaaagtaaatgtggtgtgcaatgcttagcctagaaaggacataaatacttctacttatttttttaaaaaaaaaaagaagaaaagagttgaaatagtagtccctagtgtaagatacatcaaaagtttataaccacctcaagatctgagcctgggtacaagaaatttcactccagaataaaaaactgtaaaatagggcatttgcaatgccaccggttttttcaatattgcaaggatgccactcgaatgacagttctagtggcatttttgcaattttctagtggcagttttgcaataacgatttaaagtagtggcaaatttgcatttgcccctaaaataaaacatttgaccgcttctacaacttgccaatctacagttaccattagactaaccttcatcagcagcgcagtagactcgcatcgttaggatccttctcttgttctggtagggaacaccgaaggaaactataaatgaaaaaccaagaaaaataaagaggggcgagaactccagtcagttgatgtaaggaatgcaggaaacttcaataacacaaacagagagggcggaggacaaaaaagatgaggcgtaatgatgaaagaacacacaaagttgttttaacacaatgaaattatatggcactagagagatcatcaactacaatttcctacatcgaactagccagattacatacatatatataagcaggtcagcaacgtcccaattaatgtttacaggcatctattgcagctgacggattattagtgttgcttcacaaactaaacttataaaccaaattaatcagcaacgtgcatgtgtgtgcatactgctaaacacaattggccaataagctcaaagacgagtatacaggggtagtccggtagattagataacaattacagtagctcactgaattgttcttcccatcatcttgcacatgctaattccattgtcagttggttaaatatggagtagttcgatagctaattagacaagatggatatcactagatcgaagaccaagtcatcatacatatgaatgcgttggctggctcgccgaatggatggatggatcgagtttaatctctacttgttcagaaatcagaagaacagaaatcagaagaatgcacagctgctttgtggattggcctgctgctgtgtctagccacctcccgcctccctttgctgcgccgcctccccgtgctgccccatatctcgccggaccctacgcggcggtcgcggccgcgactagcgcctcagctataccacaagccctagcccatggcggctgcattcggcgccacacgctgtgacgcagtgcaccacgcagcttagacagttcgaacgagcgagaggatgcagtgggaggaggagactcacgtacgtgtgcttccggcgagaggcggcgcagccgcaataggcgggagaagggcggagacggccatgccgacggcggcgcggcggcgcgagatgtccgcctccggtggtttcctttttttctctctgattttttttttcacgagaggagtaactgagctggatagggctttgtttgggctcagtgcagtatttgttttccttggaactgggctgggcaagagcttaggcctccttctatgcttgtccacctcatacaaaagatagaaaaaaagtctacctctctaagattgtctcatagcatattgtttataatattttgggttccacaattcctctcacattttctttaggagcttagctcttgaagaagagataatgcattctctctccttatcttttttctcttccacatcatataaaagctgatgtggagatttatgagctagctgactcacccttgttagaggaggccttatggcccaacctttcgaaacatgatactacatgaaaaaaagatattctgatttacatgaagtgccttgtgatactgttagactcatatttgaaaatgctttttacataaagttggttcgtagttcttgatatatactaatatattgttttaaaaaattaatagttaaagctttatatcgatgagttaagaactcgctgcacgcattatttttttttcttttagagaggtagtaccagtgttctatgccactagctagcatgcacgtcacaattaagcaaaggctgaacatgcaaaaggttttatttatgtcatgggtagaatcggtttctagctgcttagggcaagcactacggtggtgtttggatttagcgactaaactttaacccctgtcacatagaatgtttggacactaatttggagtattaagcacagactaattacaaaactaattacataaatgaaagctaattcgagaaacaaattttttaagcctaagtaatccataattagcacatgtttactgtagcatcacataagtaatcatggattaattagactcaatagatgcgtctcgcgaattagtcaagggttatcaaatgggttttgtcattagtctacgtttaatacttctatgtagtgtctcaacatccaatgtaacagggactaaaatttagcacctggatccaaacagggcctataatgctacatattttgcccctaaaagtaccacattggattgagtgatgagatggaggagagaagtgaggagagagatgatgagccacccctaagagcaagtacaatagtaggctataagccagctataaacatattttaaagagataaaggaagagagagaagagaagcgggctacagatctgtagccagctgcagcacggactccaagacgtaatgtgtgtatgacaggtgggaccaagtattaatagcgtagtaaacaactattgtatgaattggctattacattggtataaatgatttggagctagtagcgagctgtagtattaaacttgctctaaatcaagaggcaacctccacacaaaattcaagactggtgtgagagtattagagatattggtgtttgtgtactatatgtaacatattgtatgaattgcctcttaatttaatagtgaatgatatagataaatttagaggtggtagtcacatctaccataacacttatccttacttagttcatgacctcctagaaggtgatctcaactacctctaccttgttttcgcttagagcaagtacaatagcaggctataagccagctataaccacatatcgagaagaaaagggaagagaaaagaaagcaggctacatatttatagccagctgcaacacggacttcaacacgtcgtgtgtggatgagaggtaggtccgggtattaacggtatagtatatttttatagataactattatataaatgggctattatatgaatggctattagattagctattgataattcggagctaatatttagctatactattaaacttgctcttattcccacaaaagaaacccttgtagtaataagtgatgatccacggtgccatgtgcagctactatagctaggaggcttaaagtgcaatctaggattaattaagttaaatgaagtcgtactgcatctcacaaggcactttttgactttgactgaatattagttggtggaattacagtctctcatcaggtttgcttcagattctaaatgcagccggtaagaattcagctgacgagaatatcgaaaagttaggaaaatcaccttctttatttttaggattctgcaatttcaatttcttaaaatctatttattatatactaaaaatccattaagcttattatagacgctcttaaattgacatgtgacactctacaaccgctcataggccactatatggtactccctccgtcccactatgaaactgtttcatagttctaggatgggtctaatctcatcctaggttgcaatatattgggacggagggagtaatatctaatcttaccgtcgattttcacttaaattaccaatattttagaccattagattagatctattattaaaaaaaagtaatatctttctcatgtactattcgttatacatgacaaatatataactgttggtcatgaaagaaaaaagtactccgtacaattgaaacatgaaatatgcatgacaaatatataattgtatgtttttttcctttgctgaatagttttaacaacaaacgaacaatcaagtaacatgcgtaataaactactcatgatatgttttcttatagttggaaaattctaacatgttaggcataattgatagaggtattgtcatatgccacactgacatgggctataagtatactaacatgaattagttattgtgaataagtttgaaaaaaaatgcattcgtatctcatgtcattttgaacaatatgtattaaaccagacattaaactatagatatttttgaaaatataaataataatatagtactttggacattatcgtggtagtatttataaaaatgattttgtcatggttacatataaatccccctattgttttgggataaaatttgactcctcgaatttatgtgacggagggagtataagtaatataagtttatctttattagatgaagtagtctattagctacattttaatggaaaatatctttcattgatatatcataaaattcattaagtcatctatagcatataagaaaaaaatgttactaacagtttggaaacttatattccaaaaaagaatcacacatagtacaagtatatatgaatcaactccattatcataaatttaaggttgtatgatttcaagtaattttaggatagaatttatatgttacaaggtgttgatgcgaaaaacatgaggcctggaagatctgcttaacttcagtgcaggtccaaaaaatcttgcttttaggttcgtgagcgtactagtcgatttaatcctgcaatcaacaagaaataaagacagaaaaatagcagttaaatccataaacgatagccgatcagctagctgccaatgacgtatcatttatctttgagccgatgtcatatatgaatcgatcaaactaaatctattcgatcggctgtagatatcaatggtatataatacttttatcgatatatacttaaatcaagtgattgggatagatcggtcgccatgccgagacagtataaatcacttagatcgaaatatatattaacaagaagattataaatatttatagcatagccgatcagatagatctagcatgtatcggttaatactccgataccactctatattaagatattaaagcaagtaaaatatatcaaacagaagcctaatatactttgttgtagtaagatcttaacataaagggcagatctagcatatcaattaagcatgtaagatataaagctaaatcaggtatgatcggctgaaaccccgacactaccttaatcagcaaccaaaagcaggctagagattgagattctaagcacgacttaatagatcaaacttaactgatgcaacattaagtatgaaaagaagaacaatatctagacaatcaagcagttggatgtttcatagagtggtggatatcctatataatctaagtcaatgttggtatttaacctaatcggctgccttcccacaatagatgttagccgactgagggttaaataacaatattgccggagattatataaaatatatgataacttgacgaattacataaacaatattagagtatcataaagatggaagcactaatcccgagaacgcaagccgccataacaagttttacctctagttgaagatcgaaaccgatgcagctcaactcgaaagcaagaactcgttgaaacaaaacgaaagtaaagggtggcgatgcgccgagattgtattgaacgtgtgttagattgattacatggggctcggggtctatttatactcgagattacaaaatatgtccatgttggacacgactcttatctctaacaaactctaagataccataagtctttgcggcagacttttgtccaaacttatctttaaggaaattacataaaatatcctaattaatagatacaattgccttttcaggactcaatccatgcatggcaatccatatgaagcactttaacttaacccgatgtcgtgtaacaagtcatattgtcggaatcggctaaccttgtccgactcgcactctgccgatcctgatcgcggccgattcggactttagccgattcttgctctgttttcggaacgatctccttcttggattccgcttcggttttaccttcacctccgatacttgaattactaaatttggttgttaacacaagggtaattagaagaaaattataaccaatatccaaaaccaaaacatgtttcaaatgaagtcagaatatttcaagaataccatcgtaacatgaacattaataatgaaaattaaagcaatattaaacaaggtgctcaggcatatgcatggcctatcttcttagcttaaaagaaaaactggataattgtaagagaagttgtagcctgcagctactggaaactcttctaaacaatttcttcgtgtgccatagggacctagacaccagatatgacaatggaaaatgacttgcatgtcctaattatggccccttaaccatttctacatattcctttgaaatgcaggcattttacatgatttttattaattatttttaattcccataaaaaaattcttcgtcgttccgaaaggtggaacctttccatgcagaactcagcgtgcttttactgtacacggtaggctgtagctgggactgaaagtagccgttggatgctcctactcctgctaccgtgccgttacggcatacgtggccacgcgcggtccacggatagattatagccgttggatggagatacaatacaattgtcgttgccgtgtaccgctcacgcattgtaaagaggcccacgtgtaatagacagcgggtggtaaataattaattaccacatcttaaaagtggcatggagttaaatgtctcatatgcatcggtaatgcacgacaaaggtggtgttcttttttcttgaaaatgaagattaagtttttttactcaaaacgatgtggtattaacgtatgattaattgagttttaattattacaaacttaaaaagtagattaatatgatattttagagtaactttcatataaagttttcgcacgaaacgcaacatttagtagtttgaaaaacgtgccacgaaaattttaatcttcattcaattcttgtcgtagaaaagaacggggccaaagtctttgcgcaggcactggcattgcacgatccgtttttgattgcgaggatcgctttgtcgagggtcacactgcccagagggtgatagtatcgtgaatacgcacgtacaaacgattaattacatgccttctctggtggcatgctatttaattcttgatttctctccccgtaaataaaaaaaaagaattcttgatttctcccttgccctctctccctcaatccaaaagacgtggctagagttacgcccggtgctcaactgataaggcttggctttgaacggtctcggctatagcttccttgatgatctagcggtgatcggtcatgtttaacgatggctggtccggtactagtccggtactagccttctgtttgtgtttggctatatgtagatgttgtcggtgtgtggaaaatttttttctttcctggctattgcatttcaaggcattagctttgtaattttttttctactctattcaatgaatcatcttgttgatcattaaaaaaagttcatgatttgtttcatccaaatgattacatgcgcgtttccatctggtgtcgtatcccttattcagggttggtcgggaaaattccgtgcccctttccgaaatcccttctttccataaagttaaggccaaaaactcaaacctcatgcttccacgtcatcatcaaattgtgaaccattggatgaatgcattagatcgcttctcagacgttggatgaaatacagcatagagcctaacccatcagtcactaggtgagtctcttcgcctcctcagtgccaaatgcaacccacatgaacacattggcccatgcatctccacagtgagtctctttgcctcctcatgccaaatgcggcccacatgaacacattggtccatctccacacacatctatatgtattcagcccgtcaatctgtataaaagagctttatggctgaacgcctctttagttgacatgtgctacctaaattatttacaaattttggatagggctgttgaaaagaatttctccaagaaagctatttgtttcttccgtttcttcttgagattgtacctccaatctaacaaattgatgttaaccaagtcccgcagcaatgcgcggggcatcctctagttgtaaagagggccgaggccaaaatttatgctagaacaatactccctcattcccaaattgatcatataagagaattcaacattcaccccgttcctattttaacactttaatagcacccaaagttcaccttgttcccatttttaacacttccgtcaattctcggttatttttcgtccgccttaatcgctattgacccagccacgtacactatatgatgtttctacccctcacaagtacaagtaggatgcatgataatgaggggtagaaacgtcatattatgtgcgtggctgggtaaatagcgatcaaggtgtacggaaaagatcgagaattaacggaagtgttaaaaatgggaatgtggtgaattttgggtaatattaaagtgaaccggtatctttcggtgctataaaacaaaaaaatgtgaacttttgatactatataaccaattttgcctaaatattagtggtaggggtggtgcggcatattggataccaccaccactaagactgagttctttccccaactttcgcaactcacctcttttgttttctgtgaacacgcttttcaaactgctaaatggtgtgtttttttaaaaaagtttctatatgttagttgctttagaaaaatcatattaatctattttttaaaaaataataagtacttaattaatcataagaaaatgcattgctccattttacttgcacaggagatgagttctcaacatcacctcccgaacacagcctaacattttaaatatgtagtgaagtctttaaaaatatctaggttaaaaaatggtcatatgatatttatctccgtcatcagagtaaaacttttatactcatatagttgaatatgaatttgggagtaaaaagttattcacggtgactttataggcgtttaataaatattgtctgcaatatatttgttctagaataagtttatttttaaagtaatcattgcattagagtttgtgaaagtagaagaaattgtgttggacaaagataaagtgagaaataattatattgtgattcgataaggtatgagtgttttttttattgggacgtgtgggatgtgtgaaaaacgaaaattttttgggacagatgtaatactactagtgggttgttcaattcgttgaaatgacgaaacttgaatgctttacactagctcgtcgatgaaacggctgtacgctaaaatcacggcaaataagatttggaaacgagtttggatgggaagagagacatatggcatggctttcttccccaatccaaaaaaagttccaaactcaacaaaccgggaaacaaaacgaaacaaaaggggtacagtacaccctgctgcccacgccgcagacacctttccctccccccttcttctccacctcacctcaaaccccccctaggccctagctcccccaccattcccaacctcctccccttcctcgccaccaccaccattgccatgggattcccctgtctcacgcgcccctagcgcccccccctcgcgcagcgtgccgccatagccatggaacaacccgctgctgcccagccatcatcatcagcagcgtcgggagcaggagcaggagcagcgggcccggttcttggcaaggtcgcggggcaggagggtgcctccacctccgccgccgcggcggtagctgctcgtcggggtgagggtgactgccgcggggaggaggaggtgccgctgcgggtgcggctcgggagggccgcgaggaggcgggctgggccctgcacgccgtcgccgtcgtggaagctggagggggaggaggtggaggtggcggcgggggaactggctccggtgcacccggcggtggcgcccgccaggcggagctccgcgtcggcttccgcctcggcgcggcagctgggagccagcctgtgggagatccacgacgtcatgcgggaggggcgcggcggcgggtcgcggaggcgcaggagcgggaggccgctcgcctccgccggcggcgagctgcatcaggtgaggggttaattaataggtgtcttccttcgaactagcccaaaacctcctcctcatgtggcaaaagtaacatcaactgaattgtaattcgttggcccgcagcaacaagaggaaggagactgattactgctagtagtagatgatttatttacttaaacatagcaaatggatgcactagcactgatgaaatgtagcccaaaaccaagacatttgcagcgctcgatttactgtctttccatgtttttgcctgtttcctggtgtgatgttctgctttttgtttgtttcgactgtttcttccattagtagtgggcatttttttttgatagtagagcttggtcgtcttcactaaattgattttattaatgccgctactgttctcaactctcaatccagcatttgcttgctggctagtatgaactatggatctgttctatctgttattctatcagtacaatttgcactgtcagtgcttgagagttgagtaaaaattgttgcttattgattggacggggttacaagtttttattaaaagtaaacacaacctttcttgaaggtttcgaactgctaactttgcaaccaatcttctgacttgtaatgttgtctcagtactcatcttttgtgctttgaagaatacatcagggttttacactttgttccttggaattggaaaaaaggtgaatccttttgctttgcaatgtactaactgaccaacatgctagttcttcagtttgcggaatgttcctagggagtgtgtttggcatgtcatggaatgtgagctatttacaactcgtgtaatccacattaggcatcatttacgttaagctgcctttacatgatgttagctctgtctgtgtgcatgttctcctttctacaatgtttgcacacatgttctgtatattaacttttgacctcatatgtggtgttgagatgtaatattcaagcatacagctgttaacaatatatcagacatatttaaactttgaagagatttatctagcaaatgcacaaaaggtgttttaccatttcccatagtcttgattgctgaatataattattgcaccatatatagtaacacgattattttattttgtatttgttctatgctaaatattttttcgttacattcaacctcagaattcaggtggctttggtaggcatattgcagattcatcaacgaatcatcagaagttaaatcaagcaaggaattgtacagcacaacctttttctcctggaagttacagaagctcagttggggtatgtttgtatatattcttatctgctgtgatccatattcttatctgctgtgatcctcttggctgctttaatattttggtttgtgggcatataacaaaatcttatggtactatatggtaatgtgtgttagtaggggtaagattttctatcttgtgattctgttgcgtttttcattacacatgtttgtgtctgatggagaagttttgggagtgtaacagtatgctttatcaagacaagtcattgagtagcctagcagtctagctaatgcttctcgactaaaaataatcatgaatgattgatagtaattaaataatacatttgtgcatcgttttgtctgctcattctttatttagataaacagaagtatgaatttatttgctaggaaaaagaaagaacaatgaagtcagtcccatagtattttgcctgctgtctattgtagataacttgaaacttctctatatttcttgatgcaactaaatatgtttcccagatgtaacaaccagcacaacaagcacattctcaaaagaatgtttcttttttcttgtattttacaggattccagtataaatcaagcgatcagtccagctcgctctttggatatcaagggtagattcaggggggctgattataaccttaagacatcaacagaactcttgaaggttctaaatcgaatctggagcctggaagaacaacatacagctgatatgtcagcgattaatggactaaaattggaattacagcatgcacaggaacacattcaagaacttaagtgtgagagaagaggatatcgccatgatgttgcttcactggtgaggcaactctctgaggacaaacttgtccggaaaaataaagacaaagagaagattgcagcagacattcattccctgcaagatgaactggaggatgagagacgccttaggagacattctgaagacctccacaggaagtttggcaaggagttatctgagataaaatcagcatttgtcaaggcagttaaggaccttgagaaagagaagaaaacaaagaacctgttagaggacctttgtgaccaattcgcaatgggaatccgagactatgaagaggaagtcagggcattgaaacaaaggcatgtaaattacgaataccagtttgataaatcagtgcttcatgtatcagaagcatggcttgatgagagaatgcaaatgcaaaatactgatgtcaaggaagactcactgaagaaatcaacaattacagagaggctaagaagtgaaatcgaggcttttcttcttgccaaaagatcggttagctttaagaataatgacaactacatgcatgatagtaggccaaatgctcggttacgtcggcaatctcttgagtctgtccattttaatggagccactagtgctccccagctagctgaagatgatgatgatgattctgttgctagtgatttgcattgctttgagctcaacatgcatggaagtagcattcagatgcatgaccatacagggcctcgcagaagctacacaggcaacatggatgcacctaagagaagaacagaatactcgcatagtgtagttggtgagagttcacatatgtctgacgtgcaaatttattcacagtgtaacaaagcaaggtccagtagcagcagaccatggcatgccactagaactcaagaaatcgactcacaggccagcgctagaactgttccagcagacgagcagaatgagatcccttgcccccatatttctcaaggatatcacaatggcacaacatcgaagaacaacctgggggctcatgccgactgtctggggcaggaatcccttgatcattactcgcgagctagtctattttgtgatggaactacttcgggggatttatgcaatccacacagtccatcgcgacagcttgattatccgtccgcatcattgggccatgacataggtgaatgctcaacagggcttctagtaggcatgaaggagaacaccctgaaggcaaaactgcttcaagcaaggcttgaggggcggcatgcccggttgaaggcgtcaggaggttcggtaaccagcaggagaaaatgagagtgctgctgccaatctgttgtaatttctgctactcgacgcccactcagcaaagcaaaggtgtaatataagatggctcatgtagctgcagcattttctcccgtcgtgttgatttttggttcacagcccaaaccagccatcaagttgtggcgtcgccagagattgtggcgagagaaataatcgccacagctgtggcggaaataagcatgcaaatgaactagcaaaaagtgtggctgccacaactcacgtattaaccaaacatcagtcaaactgtcgtggcagccgcatgtttggcgaggcaatgtgtggcagggatccaaacaccccctcagtaacaaccatgtacattgcaagctgcacagtgtgttgaaatcttagttgcatctgtgtgagctcgtttgtaaatctggacggctagttatccaggacggtagagttcaagaactcgacttcctcagaaggattttgtttctgccatttgtatatttattatctgatcttgcatggaccatggcaaggggcgggttgatttgatgcatcaactgatatctcttcgtgcccctgatgtgattaatgattcgtcgactaattttttcgcttacgcttatacttataagttaaatttaaattttctactgaattttgatcttttctttttttttatcgtagtttattttataggattttctttgaagttgctaaaaatatatgtatataaaagttttattcataaataatcttttatttgttaataagcggttcggataggtatatgaatgaacgaaacaataggttggataagtacaacatatgtgaaccggaattgaattggattgcagctgcaacgttacacacttgcagaacagaattcgtgattaccagaatgtctctgaacccttggtatgtaggctgtgtttatccataggtgaaaagttttggtgtgtcacatcggatatacggatacccatttgaaatattaaacatagactaataacaaaataaattacaaatttcgcttgtaaactatgagatgaatttattaaacctaattaatatatcattagcaaatgtttactgtagcatcacattgtcgatcatggagcaattagccttaaaagtttcgtctcgcaattttacatgcaatctgtgtaattagtttttttttctgcctcgcaaggtgaaaaattttgcgtatgcatgaactttccagcatccttcatgctatttgcacgtgaatttcatgtaaactggctgcagtaggttggtttgccgaagcatgcagattgctcagctactattatataatatatatcaaaagttgtagcacaagaaaaacgctgcaactctcagaacggcaattaattaagcgaaatgagccaaccacagaacgggtcgtgtttcatagagaaagcagcagcagctcctcctccgtgttttccatcctcgcggtcagagcttgaccgagccatcgtgatacaaacatcgtaacgtttgatttcataagtcttcatggttgccttatcgtctgaatctaaaacttaagttgtccaagtaaattgagtttgtttaatatcaaatgtacgtaattttgaatcgcaaaaataaaaataaaaataaaaatgagtatatatatttatctcattgtttcgtccagaactaattataagctttaacacttgttaacaatcaaaacctaatttatgagtaatttttatatatgtatttttagtgacttagatctaatgctgaaaaataaactacgacaaaacaaagcatcaaaagaaactctaaaattaagttctataattaaaattttgcctgaaactcataagctaagaagtgaatgatagagctgtataattgatccatacaattatataataagataaaacaatagtactactaggaggcctcactagtgccgttgaccccttctgactagctggtgagccaagtggcgtgctggggcggcagtggcggaggcggtgcagatcgggcactgttgagtggaggttgcaagagggggtgtcggggggaggaagatggaaggggttttagggtttgattatccttcatgaatctttaaacaatcggatggtctaaaatatacaagatgtctacgggggattttcttgtcaaatgatacctatatagtccctatttataatactacatccattcccatcctaagtagcaacattttgggacggattaagtacacaccttcctccgtcgtaaccatgtatagtaagcacggtttccacactggcacactatacaattttcacgtaaccggcaacattttttcaccgtccatttcttgttttacctccagaccttgatgagcagagtaattaagcaaaatgggctagccacagaatgggtcgtgtttgtagtttcgcagagaaagcagcggcacttccgtgttttagcgagttgtcgtgatacgaactttgcaacgcttgttttcaggagttttcatggtcaccgtatagtttgaatctaaaatttgtccaagtaaatgtgttttgtaatgtcaaatgtacaccacttcaaatacattaagttgagtatctcatcgttctgtcaacagttgattcctacaagtcgtagcactgattgacgacttaaaatttaatattgtaaaataaactatgataaaaatttaaaatcaactctcaaaattaagttttaaaattaaaattttagttatgacttataagctgaagaataaatagtgaagttgtatagtcaaacgataaagttatacataagataagatgaaatgataatatctattataaaatgggatttctctacgtaattgtaacatgcaactaaatttggattatatctatatacctatatagttggaaccaaaagcttgatatgtattgagcaacatcatctagaactagaaaatagtagcatttggatccctttcatgctttgatcttgaccatccatttgtcatatgcatttacaacacactaagtgtagttatagctataaagctccatgtgcatttgatatgccctagcccccgtcacatgaacacacaagacaatcatgtgactaagttgctaatgagagccaatccgttacaccatttcaaggactgataacatgtagccgcgcaaagaaactacaacaagaagtgaactcgctcctagctgaaacatatttcaatattgacgagaattatatactacctaaatcaagtactttgctattacttaggtttacacatgcaaaagactcgctgggcattgacgacgagctagaatatcaaaatgatgatgggttacgtaaagacgacgaccatttacgtcatgctgattttggagcacactgtctccaaacatttgctccaacttccaagggatgtgtgacccatccagtcaactttctccatgcttaatatatatggttggaaatataatcaattatagtttcacctccaataaacggttcgtcatttcaacttcccaataaggagtaatggacaaatcattgaggactgctaagaagccaaacaaacgcgagagtcttcttgggaattcacttattgtgacctttgagctaacctatgtccagtaaactcccaagacctttcattctcatctatgagggttgttcctagtataaatatctcctatgctttatcatttggaagacttttaacaatgagaatatgaaccccctttgtttagctgcgtgctcacaaattcggagagagatctctacccctttgctcttgtgatttccttgtgggattacagaagcggcattcgacgccctccaattggtgctcctggtccctttgaggatttttccttgattaattccaggttgtgttggttggtaacttagagtgtggttagacgaaccctcaattcaggttgtcgtaatagagacggtggttggcttcaagtatgattgttaggttgcactgttatcttggcttcttgtagctagttatcttgagttcttgatcctacgttgtgaagatcggaacaacacccctacttgggtcgtaccagcattgaaccatgacacctagaaaactaataaccattagacccctctcatatttgatacataagcatccaagcgtcatatagaattgcaatttcacatcaactgctgtagaataaatattgttcatttagatatttcgagtacacgatttatatattgtttccttcaagtttcctttgagtatttctaaatttcttgttgcaaggcgcaggtatccaagtttttaagatggctagactacaacgaacaaaaggatgtaacatactttgatgtatggtattttttgtatttataatttcttttataaagacaaacggttaaaatttaaacatggatagcgtgaattgacgagtgctggaaaacaaatggagtatatattggagtcataaatagttgtctttctattagattacctactctattctagaaaatcaacttctgaatttaaatatgagcatagccaataaaagttccatgcgcattgaaccatgacacctagaaaactaatagccattggatccctcttatatttgatacataagcatccaagcgtcatatagaattgtaatttcacattaactactatagaacaaatattgtccatttagatattacgaatacacgatttacatattgtttcctttaatttttctttgaagtatttctaaatttcccgctgcagtgcgtgcgatatccgctagtatgtataatacatacacacctttctccgccgtaaccgtgtatagtaagcatggtttccatgttggcacactgcaattttcacgcaatcggcaatgttttttcaccgcccatttcttgttttaccccccatgaccaagatgagcagagtaattaagcgaaatgggacaaccacagaatggattgtgtttgtagttttatagagaaaacaacaacacttccatgttttccatcctcagggtcgcagttagagcttaatcgagtcatcgtgatatgaagttcgtaacatcgcgtttgttttcaggagtcttcatagtcaccgtcgcggttagagcttaaccgagtcgtcgtgatacaaagttcgtaacatggcgtttgttttcaggagtcttcatggtcactgttcgtatagtttgaatctaaatgttgtctgagtaaattgtgttttgtaatgtcaaatgtacacagctttaaatgtattaagttgagtatatcattgttctgtcaatggttgattataaactgtagcaatgattgacgactaaaaatttaattttgtaaaataaactatgataaaaaacatgaaagtcaactcttaaaattatgttttaaagttaaaattttagagccgaagaacaaacggtgaagttgtgtcgtggatcgatgaagttatacaaattttaatgtgcaagtaatttagattatatatttacgatacatagacaccttcctccgccgtaaccttgtatagtaagctttccacaccggtacattgcaattttcacgcaaatggtgacgttttttcaccgcccatttcctatatattttacccccacgaccacgatgagtagagtaataagcgaaatgggccaacaacagaatggatcgtgtttgtagtttcacagagaaagcagtagcacttccgtgttttccatcctcacggtcatggtcacagcttaatctagtcgttatgatacaaacttcctaacgtgacgtttgtttttttagcattcatgattaccgtataatctgaatataaacgtttttggaataaattgtgttttgtaatgtgaaatatacaccgcttcaaatagattaagttgagtgtatacagagtatctcattgttttgttaacgggtcattataagccgtagcactaattgatgacttaaaatttaatattgtataataaactatgataaataaaacgtaaaaactaactcaaaaattaaattttttgttataacttataagttgatgaagcttaataacaaaaagtgtatcatcgattaagttatgcataacataaaacgataaaacctattataaaaaggggaatcttcacataattttaacgcacaagtaaattcagattatataactatgtaatgtatgttagatttaattgggtaattaatccatttaaatcaattaaatcaaataaattccaaggctccttatgctaggaattcatgtgaattcattcttctatgggatatcaatgggatgaagagttttgagaattaatccatttgattaaggaattggtaacttacatcaattactcttaattgattgttggttgatggttgtgtagtggaggatggttcatggctacttgatgacaattagttgctctattcctcttcctattccattggtaacttacatcaattactcttaattgattgttggttgatggttgtgtagtggaggatggttcatggctagttgatgacaattagttgctccattcctcttcctattccatgactcttactcttcatcttccattcctcttataaaatgggaattgatttgatctcccgcgagaaaaagaagacacactttcatccattttccaaagctgttgttgctacggtaatcccatcccgacgagtgtgtgcacacgcgttgggagagtaggcctccgaaaccacgcgttgctgcgacgtttgcacagacgggcgggcgatcaggtttttggggagcgcaaggcgcgactactcactgttcgtcaacatctacttcatcttcaccaacatgtcgaacactggagacaaggagaaggagactcccgtcaacaccaacggaggcaatactgcctcaaactccagcggaggaccattcttggggtataaccttattacattatttcaattagaagttttactgttaatgttcatcgcaatgtcaacattgtgtcattatgtgattgttgatgcttattcaacgttaagcatgctcatgttgattacattcaccactatcactggatcaaatcctattgtaaatatcatgtttattatcttgttattttggattaaaatatgccgaattatgaccaaatttccaacaatccaaaaacctgataggtcattctcggtagttggctttgctgctgcactgaaaccacatgcctttgatggttcaaactataagagatggaaagcacgtgcactattgtggttgacagcgatgcagtgcttctatgtttcacggggcaaacgaagtgaaccacctctttctcctgaggaagaggctaagttcgaggcttcggattgcctgttccgtggagcattgatcagtgtactcgctgacaacatagtggacgtgtacatgcacatgccttctgggaaggacatgtgggatgcacttgaggccaagttcggagtttctgacgccggcagtgagctgtatgttatggagcagttctatgactacaagatggtcgatgaccgttctgtagttgaacaagctcatgagattcagatgctggctaaggaacttgagaacaacaactgtgagttgccggacaagtttgtggcaggtggcattattgccaaactaccaccttcttggtcggactttgccacttctctaaagcacaagagacaagagttcagtgttcctgatctcattggctctttgggtgttgaggagaaggcgagggcaaaggacgtccggggcaaaaaggttgagggaggttctagtgccaatatggtacagaagaagaaccctcatgcatcccacaacaacaagaaagtcaagcctgatgtcaaactcaaggctgcaaccaattttaagaagaaaagcaagggaaaggcaaagggagactgctttgtgtgtggcaagtctgggcattggaccaaggactgtcctgagcgcaaagacaggaagtctgccaacatgatcattagcgagggcggaggaacatcggggtacggtaaaatattacctacagttctctctgtttttcattcacctgattggtgggtggacactggtgctaatattcatgtatgtgctgacatttctctattttcttcttatcaggtcgggagaggttcctccttgttgatgggaaacgggtcgcttgcggctgttcatggtgttggtacggtcgatctgaagtttacttcgggaaagaccgtgcagctgaagaacgtgcagcatgtcccttcaataaagaagaatctagttagcggctctctattgtgtagagaaggttttagacttgtgtttgagtccaataaatgtgtcgtatctaaatatgggacttttgttggaaaaggttatgacagcggaggcttgttccgcttttctttgaatgacatgtgtaataatcataatgctgtgaaccatattagcgagaatgatgagtctaatgtgtggcattcgcgactctgtcatgtgaatttcggttgtatgacgcgcttagctaacatgagtttaattccaaaattcactttggtaaaaggttccaagtgccatacttgtgttcaatcgaaacaacctcgcaagcctcacaaggcatctgaggcgagaaatttggcacctctagaacttgttcattccgatttgtgcgaaatgaacggcgtgttgactaaagggggaaagaaatatttcatgacactgatagatgattgcactagattttgctatgtgtatctattgaaaacaaaggatgaggcattgcatttctttaaaatctataaagctgaggtagaaaaccaacttgaaaggaaaatcaaacggttgaagtctgatagaggtggggagtatttttccaatgagtttacatccttttgcgaagagtttggaattattcatgagatgacgcctccctattcaccccaatcaaatagggtggccaaaagaaagaaccgtactctaactgagatggtgaatgccatgttagacactgcggggctttccaaggaatggtggggtgaggcagttttgactgcgtgtcatgtcctgaataaaattccaataaagcataaggaagtaacaccattcgaggaatgggaaaggaagaaattaaatctctcatacctacgaacatggggctgtttggccaaggtaaatgtacctatagccaaaaagcggaaacttggaccaaaaactgttgattgtgtgtttcttggttatgctatccacagtgtgggttatagattcttaatagtaaactctggagtacccgacatgcatgttggtacaattcttgagtccagagatgctacattctttgagaatgaatttcctatgaaatatacacctagcacttctagtaaagaaactgtcatgccccatgagcactttgcaccgatagaacacaatgatcaaacgcctgaggaaaatcctgaggaggacaacattgtagatactcgcaagagtaagagacaaagggttgcaaaatcctttggagatgactacattgtatacctcgtggatgacaccccaagaaccatagaagaggcatattcatctcctgacgctgactactggaaggaagcagtacgcagtgaaatggactcgattatgtctaatggtacttgggaagtcgttgagcgtccatatgggtgcaagcccgtaggatgcaaatgggttttcaagaaaaagcttaggcctgatggtacaatcgaaaagtacaaggcaaggcttgtggccaagggttatacccaaaaggaaggcgaggacttcttcgacacatactcaccagttgctcgcttgaccacgattcgagtactacttgctctggcagcctctcatggtcttctcgtccatcagatggacgttaagacagctttcctaaacggagagctggaggaggagatctatatggatcaaccagacgggtatgtactagaaggtcaggagggaatggtgtgtaaactattgaaatccttgtatggcctcaagcaagcacctaagcaatggcatgagaagtttgacaccacgcttacatctgcaggctttgttgtgaacgaagctgacaaatgtgtatactatcgctatggtgggggagaaggggtgatcttgtgcttatatgtcgatgacatactgatctttgggaccagccgtaatgtgattgaggaggtcaaagactatctgtccaagagttttgaaatgaaagatttgggagaggctgatgttattcttaacatcaaactacaaagaggagatgagggtgggattacacttgtgcaatcccactatgtggacaaggttttgagtcgctttggatatagtgactgcaagccagctcctactccttatgatcccaacgtgctattaaggaaaaaccgaagaatagcaagggatcagctgagatactctcaaatcattggttcattgatgtacttggctagcgcaacgaggcctgacatctcatttgctgtaagcaagctgagccggtttgtctcaaatccgggagatgatcattggcaggctctggaaagagtaatgcgctatctaaagggtactatgagctatggaattcactataccgggtatccaaaagtactagaagggtatagtgactcaaactggatatctgatgctgatgagataaaagccacaagtggatatgtgttcacacttggaggtggcgctgtttcctggaagtcttgcaagcagaccatcttaacgaggtcaacaatggaagcagaacttacagcactagatactgcgacagttgaggccgagtggcttcgtgaactcctgatggatttgccggtagttgaaaaaccagtgccagctatcctaatgaactgcgataatcaaacagtgattattaaagtgaacagttcaaaggacaacatgaagtcatctagacacatcaagagaagactgaaatctgtcagaaagcagaaaaactccggagtgatagcattggactatgtccaaacggctagaaatctggcagatcagtttaccaaggggctaccacgtaatgtgatagacagtgcatcgagggaaatgggcttgatacccacctaaggttgcataatagtggaaacctgtccattatgatcggagatcccgtgaatttggatggtgaaacaaactattgtgtgactgagagaagagacccttgaaaagggctcattttcatgatgtgcttctcttctttcctgcatggtaggatggcttatgtcttaatgtgatccgagtggcttttccaagcagagatgttgacctgcagaacatcttagaaggaacacacctatatgagttcgactgctagtcacagtctatgagatttgggtgatctctagatactcatgaaaggcctggagtatgacttataagctccaacccgagggaatactaatggttgcctagtatcacttatggaattgagtgaaacctaactgcacaagactgacaattcaaggcatagtccattgttcagttgtggtcaggtgtagctccttttctaggtgaaagttcaacttaacagtcttcaccgaaacactggtatataaaagctgctatggaatagagagcattctcatgagccttgaaatttggtggggattgttagatttaattgggtaattaatccatttaaatcaattaaatcaaataaattccaaggctcattatgctaggaattcatgtgaattcattcttctatgggatatcaatgggatgaagagttttgagaattaatccatttgattaaggaattggtaacttacatcaattactcttaattgattgttggttgatggttgtgtagtggaggatggttcatggctacttgatgacaattagttgctctattcctcttcctattccattggtaacttacatcaattactcttaattgattgttggttgatggttgtgtagtggaggatagttcatggctagttgatgacaattagttgctccattcctcttcctattccatgactcttactcttcatcttccattcctcttataaaatgggaatggatttgatctcccgcgagaaaaagaagacacactttcatccattttccaaagctgttgttgctacggtaatcccatcccgacgagtgtgtgcacacgcgttgggagagtaggcctccgaaaccacgcgttgctgcgacgtttgcacagacgggcgggtgatcaggtttttggggagcgcaaggcgcgactactcactgttcgtcaacatctacttcatcttcaccaacatgtcgaacactggagacaaggagaaggagactcccgtcaacaccaacggaggtaatactgcctcaaactccagcggaggaccattcttggggtataaccttattacattatttcaattagaagttttactgttaatgttcatcgcaatgtcaacattgtgtcattatgtgattgttgatgcttattcaacgttaagcatgctcatgttgattacattcaccactatcactggatcaaatcctattgtaaatatcatgtttattatcttgttattttggattaaaatatgccgaattatgaccaaatttccaacaatgtatacacgtcattttccgccgtaatgtatagtaagcacagtttccatgccagtacactgcaattttcacgtaaccggtaacttttttcaccgcccatttcctgttttacccccacgaccagggacgggcctcggattttaagattgggtattcgatatggaaagagggtaaatttttttttttacaacacgagcacaatatttggtacgtatgatcaatgatatggtattttagtactgcttattgaattagaacttgcgacaaggtttttagcaatttccttgatttactgtgatatactttgtaaaaaaacatatgcagtacaaacttgtcagggttatggataaggcatacctcatatcctacgacttatggaatatactgataaagtataccttcatgtatacggattgttcttgtaaatatcgcgtggagtccatttctaattatggaaaatatctctacgagtcaagtgatttacaaaatcctactcgaaagggatcgatagaatttatgttataccgttacaggtcctatatcctcaaacctttcttgggggtcaagatgatccacggtataaaagggaccccctgggaggggtttagggtatcgaattccatcaccaacgcacccaccaaagtttacgaagccgaagtacacggagccaagccgccgggagatcttgtcaaaaccttagactacgatctcgtcggtgtcatctgtttcgactactctctttgtaatctgttctcatcatcatcaatctcatataaactggactagaactgttacctgataaggggcctgaaccagtataatccttgtcttttgtctgcttgatgtcgtactatgtagggcctcgtttcaacgtacctcaatactctactcatccggtccgcgagtatcactcgtcgacaaatctaccaaccaagtatatatcatgtcatcacaacacggttaatgcacaaattaggcaaccatgcaaattaggttcgaatttgagggagccagcctgctaggcttttttgttgggcttcttttgatcaaaaacgttgttttctttatttctctgcgtacatacgaagtatataccttatatatgtattcttttttaaaaatcttaggtattttcatttgaatacccttgaattgagttggcccacccctgcccatgaccatgacaaatagagtaaggccctgtttagttcaggggtgaaaagtatttgtgtgttataacggatttacggacacatatttgaagtattaaacgtagactaataacaaaacaaattacagattctgtctgtaaactgcgagaagattttattaagcctaattaatccgtcattcgtaaatgtttactgtagcaccacattatcaaatcatgacgcaatcaggcttaaaagatttgtctcgcaatttacatgtaatctgtgtaattagttttttttttttgtctatatttaatactccatgcatgtgtccaaatattcaatgtgattggggaagctggagtaggtaaaacagtactcatcatagaattaattaacaatattgctaaagctcactggggctgggtgaaaattttttatttaggaactaaacagggcctaattaagctgtgtatagtaagcacaatttccacgccgacgcactgcaattttcacgcaactttcaccgcctatttccttcttttacccccacaaccacgaccacgacgacgaccagagtaaacaagtcttattataaccacccccctctccttttccatctacctcctccaacgaagccttccttcgcccttgtcgtccaaccctcctctcctcccctcctcgtcgcggggctagggttacgccccctcctcctcctcctcctcctcctcctcgtgtgggggcatggccgggagcgaggcggcggcggcgcaggaggcggagatggacccggacttctcgggcgggggcggtgggggccccagcttcgagttcgccttcaactcggtcaacttctccgaccgggtgctccggatcgaggtcgtcgcgggggacgacgacgacgacgacgaccacgcgcccggctccagccgggacggcggggccggctcgctctcggattgggcgcgccaccgcaagcgccgccgcgaggagctcctcaaggagaaaggtgcgttgttgaaaccgcccaaattaaacgcttgtttcgtcaattttctttttaattttcgaattgtggacgatcgttttacgaaaatttcggtgccttcgatcatatattaggtggtcaatgaaaagcgaccagggtaacggagaatggatgaaaggggattttatttttctccttccaatttttagatgctctcgtgtacttgtaatagataccttttcagaatttgatattttgttctaggccgttggataattggtgatgcaagggatacaattgtgcaacctagaaattttggaagaacctgtaatcttgtactaattgattatacctgtaggatgatatgggtaagaataattcttttcatgcattgtatggataggcatggtttatgcatggatccatgtagcatactcgcctcgggttgaggggacaatgtggtcaattgtttgagataaagtgaggttatctagagaattggttgttgcatagtatataaacgagggataacgcctttgtagttcatacttctggttgggtgcacgcactagaagtatggaactgattttgttgaaaatttgatcatgaatgttggaaattgtatcatgcaatgtggctattgtgggcatattattgaacaacccttggttatcttggttatatgtttgtagcttataatatagtgattagttttagttgattttcttagattgtgttccaatgttcccccattttgtgtatacctgtacttttaatgagtaccttatgtaataatgtgtgcatattcagttggttatcatgcttcttctggtgaccaaatcagttcccactgactgaaattttttggctagtttatgtgtcaaacaaatgggtcaacactctgtagaaagagctaaagtgactgtgacaacaagccaaatcctcttgatacctagagttctctctttattttttcgtaggtttctatgatgttttttatgaaattcggagacctgcataagtcctactgcacttatgcatcttgtgtgagggcattttgtgctacacagtccacaatgtatacaagatactttgcatgaaaaatgggtttaagggctatgtactgctttgcaaagtgattgttagttttctgtttctccttatggttatatttgaaaggggtatggtgggggttggggggtaaataatacatttttataatgaagggacgcgtgaaaatatgctttgcaaaataccgttagtttttgtgtttaatcttcagacttcagttgcttgttagctgtgccgatcatgatctcaatgcttgttttgtgcttcttaggtcatgctcaaaggtagagcccggtatgggctcttatgcaaacatgtcatttagaaactgcccccttacaagagttgaggcaacaaaggctctaaccattaaccctcctaaatagttttttttattactcttctttcttttccccaccctcatgcagcaaaattttgttttatagaggctaagagtcgatgttaagcttaacattgatgtttctctctcctctttctcttccatgtcagcaaatttgcctagttggcaatgctatgagccccctactagtgactgttgtacataccctaattgtaattatgaaagtccttgattaccaattactgccacaagtcatgacttgtattttcatgttaccttctgttttacaattttctattttcattagtgatggcttcatgctgtagctataactgtgattacttgctgttatctacaatgtgccttgtaccttgatgatctttttctttttctgatgctttttttttgttacatatgattgtctagtgctacttatgcatccatccttgttctttgtgatgggagacttattttactaccaattgctatctgcagagtctgaagcagtcatgccagaccagataaattgcaaagtagaaccagaagaatgtgatgcatatgaagaaaatcaagaagaacctgtagcaatgatggacgactctccacccagtgttggccctgatggtatgtactgatgcaagttctgctacctagggtcagtctgcagtgtcgttttcctaacatgttatgttgcactgtgatgtggaatctaattatttagaatctttagtaaggctgtgttcgctatgggttgttcccaacttggaacagtagcacggaaaacggagcaatccattagcgcgtgattaattaagtattagctattttttttttcaaaaatggattaatttgattttttttaagcaacttttgtatagaaactttttgcaaaaaacacaccgtttagcagtttgaaaagcgtgcgcgtggaaaacgagggagataggttgggaaaatggacgtccgaacacagcctaagacttttctgttagagccaaacaagaaacttagaactaaatgctactattatgcatgcatttgtaaatccatcacaatgctgtcggtatgatttgttcagattactagaagcacagatacaagaaggattcaatatttcatattgttttgttatcattccttctgatagcttgtcttgattttcctgataccctgctctattaattgtatgtaattaatctgcactcatagagaagtacagtgtgctccaagtgtttttaacaactaaaaacctgtctggtgatttgtccctgggttgtgcgccttttactaattctttattgttttcccccaatattgatccgtctgtggtattttacaggtgatgatggaccaagtatggactcaccttggagtggtggggtgagcacaccagttctaagagtaaagaacatttatatcagttcagcgattcttgcagcaaaaagtcctttctttttcaaggtattctggtcaccttatcaagtgaatttgcactgtactctactcagtttgctgtcagcttcctagttcctaaaaactgtaatttgttgttcttagcttttctcaaatggcatgaaagaatctgatgagaggcaggcaacccttagaattactgattcaggtaatgcgatacctctagttaactcaaactttcttcctaacttattataatttgtgttgcagttgtgctataattctgcgtaatattcctaatttatactatattgtaatgtaatattgattttaggttttatggtgaaggtggtttctgcttctcctctttttgtctttgatattatgattagtctctttttcttcattggcttcacatattaaatagatgttttgtcaatctatctgccttcatgcatgcacaacttccttgatcatttacggaagtcaaatgatcaataattttctcttgaactctttccatatgcctcattatcttcattttacttggaacagaggaaaatgcccttatggagcttttaagctttatgtacagtggaaagttgacatcaactgaccctactcttctactggatattctgatggctgccgacaagtttgaggttatttcgtgcatgaggtactgcagtcagttgctcacaagcttgactatgactacagaatctgcactactctacctagatcttccatgctccatttcgatggctgctgcagttcaacctctgacagatgcagccaaggaatatctttccaacaaatacaaggatttgactaagtgagtgagcttcattggatggaaccttttttcctgttcgaggattaagccgagcgtagacattattgtcatgaaaccactgtaaggggacactcaagagcttggtttcttctcttttcttttttcaggttccaagatgaagtgatgaacatccctcttgctggaatcgaagccatcttgtcaagtaatgacctccaggtggcatctgaagatgctatctacgatttcttgatcaggtgggctcgcgcacaataccctaaatcagaggaaaggcgtgagatcttgagttctcgtttgcttccgctcgtgcgattcagtcacatgacctgtaggaagctgcggaaggtcctaatatgcaccgatctggaccatgagcaagcaaccaagtgtgtcactgaggcacttctatataaagctgatgctccacacaggcaacgtgctctcgcagcagacgtaacaacctgtcagaaatttgcagagcgggcttacaagtacagacctttgaaagttgttgagtttgaccgaccctacccacagtgtatagcatacttggatctaaagcgcgaagagtgctcccggctcttcccgtcaggtcggatgtactctcaagccttccatcttgcagggcagggcttcttcctctcagcacactgtaacatggaacagcagagtacgttctactgcttcggtctcttcttagggatgcaagagaagggctcaatgagcgtgacagtagattatgagtttgctgcaaggacaagaccgtcaggagagtttgtgagcaagtacaagggtaactacacgttcaccggtgggaaggcggttggttacaggaatctctttgcgataccatggtcgacgttcatggctgacgacagcctcttcttcctcgacggcgtgttgcatctgagagctgaattgacgataaagcaacccactgtctaatgtactgctgccaaactcaagttggctttgcgctcgagtgggtgatagtgcgaaacatcacatgctgcagatatcgtattgttttttttccccttcttctatgcttaaacccttttgttgatagaaactttgcaaatgacaagtggaaaaaaaaaggactaaaaccggtctcttttactggcattgtggaagaagcttatgctgctccagtcgattgtgaaaaggttaccataccagctgaagatatgatatatgagcgcctctcttaccaacttttttttttaatctccgactccatatatggatgacattctaactggccgtattatcacatggtcttaaaagttttaggcattaaattcacattcttgacttatgaatagttctaaacatgctgaaccaaccaaatagtgccctgagaagcaagtcctttttgtatcaaatgagagagggttttaggcagggggtcgctgcacggcgaccggcgaggcggcgacgcctcaaccatcggcggaggtgcaaaagcgagatgccatctgcatgctcctccctgtcggtgtgcggctgctgctgctgctgctgctgcttctgatgcaactaccacaagtgtcatgtatcactcaatcctactgtaccttgctccgaattaagctgtttgtgattggctcaactggctgccctgcaagctgcaacaaccgagacagtctcatctcacgcgattatatccacgaaaaaaatccacaatatttaaacttaacttcatgatgtatgtgatcgataccaatcggcgatgctgaacttacgccagtaactaatactccctccatattatatatatatatatatatatatatatatatatatatatatatatatatatatatatatatatatatatatatatatatatatatatatatatatacggtgagtaccgagtaggactttacatcatctaaagcaagcttctgaggctatctaaataggattcgccaccctgcaaaagatcctaaagttaaaatatctctcgaagtgaacagtaatttaaatagtaaactgaatagtgtttttgaatagtaatcagccgaataaacagtaaactgaatagtattcagccgaataaatagtgtttttgaacagtgtatattgtctgaagtataagtgtggtatcagagccagtcatcatagagaaatcaaattcaaaagctaatattggaaagataattactaccaaagataatctgaatataaggtgtagattaaatcacattgaagaccatagttggcactctaacaatagtcaattaaatttaattgttgatctgatatataatttttatataaattgggataaaaaacaggaagatttagagcgaaggattgaagatttgtttaaagaacgaaagcaatctgaagaacaatatttgcttgtcagtaataaattaaattcagtgctaaaagagctagaggattataagataaggcagaataagatattacaaaacagtgactatatcaaagaattattagaaataataaattctagtaaaggaaaagagatagttttggcttcaacaggcataattacctcgtctcaagctattaattcagaaaaatggacctatctaggagtttgtttagaagaatagcaagcagagacgataaatctttaagttgtattgataaacaaaaaggtaaaaatgaagacatagatgagcttgaagatattgcagaagtagacaaacagctcgaaagatatcaaagagatactccgagggcaataagacctcaacaaatatattgcatgggattttttgagaataaaaatgggttatacagaatatctagagaagtagagttaagcgttttaacaaagccagttgagttaaaaattgtagctaaggaatttgaaaatggattaaagtattcagggtataaatatattcaccaaggtatgtatataataagaatcaaaggtatgacaagatagaaattaggagctaaagttttaataactctgttagataaaaggtgggacacaatagataaagcagcattaggatttttagaaggtgacatgaatgagaatatgttgataacatatatagccccagatctaatgatgcctataaaagaatttatagataaaatgagttttggttttcaaacaaagggatacgagtaggggtggaatcgagccgagccaggcttggctcggcttggctcgtgaaagcttgacaaagaagaggctcggcttggcttggcttgattaatgaaacgagctaaaatagcagctcggcttggctcgtttcaaagctcgagccaactcgagccagcttggttcagatacaggcaatgaggtgatggacggcatcaacgccgtagaggacggaggcggtagaccggcggcgctgggaatggaggcgacaggctggcgacgctgtagatgagggaggccgcggaccggcggcgttggccgctagggatggaggcagtgccataggggagggaggcggcggaccggcagtgtagcggagggaagaggcgccacaggggaggaaggagacggtgcagcgcagcgcctcgatgtcctcatgcggtcgctgcggactcgcggtctcgcgtagtgggaaggggagaagacggctgcctacgcgtggggtgggtgggagactgggagaataggttaggaacttagggtttttgatgggccttgggccacagcagcgacaataatgtgataggccatttttatgcaaaaagcttgacgagctgaacgagcgggttgcgagctagcttgggctcagctcgatttagaaacgagctgcgtaggcggcttgagcttggctcgtttaggtttcaagccgagccgagcttttgcgagctcgaaccaagcccgagcctgctcacgagcccgagctttttgtccacccctagatacgaggaatttaaaggaacaaatttgctagtaagcatagaatttataggaagattaactaatagaagtgcctccaaatacaaaataaatgtaaatgacgtgattgaaaatatgcactctaagggaataactttcatgaaccctttaaaaataagttctgaagaaagggcaggagaagaatggaaaattagtgatttaattgaaagcaaaactttgagtcagcctgaaaattatataagttatcaaaatagtaaaggaaataccagcattagatttataaattacaaacccagaaccacagatgacttagaaacagaagcatctgatagaaatataatagataatagaagacatagtgtttcagagtttatggaaaaattagatcaagaaagtgagataaaatattacgaaaataaattaaaggaaataaatgaagaatataataactctatgaagtgtgagtggcctaaaataagagataaagaactttatttctatagagaattagctagagtaaagaaagtaaagaagaacgaagatatggcagtagaaatttttaaaaaccaagaaaccaagatagaacagataaagaggaaagagcaagataagcatggcaaagaagagcaaaatcttggtaaaattttaagtgaagaagagcaatgggcagagaatgaaagattatttcttgaaagttatgaagaagaaattaatctaataaatgagatggagaacatagaaaatgaaatagacaatgcagaacaatataatgattttataaacacattagatgaagtagggttacataatcttgataatgcaatggaagctatggaagtggacttaggaacaggaaagagaaaaagatatggagaaggtactgtgaaaaacgaaggagaaagagaaagaccagctagggcagcaggaaaatggccccctgatagagaagaattttcatataactatataccaggtcaatataggcatatgggtacaaagagaagagactttgagaagcctgttaaatttcaaaaccagaggagtgatggtgctatattaaatttagccgcacatgaccctattgattggcctaatattattagtatttggaaaggtttaatagttcaaaaatatatacaaaaccagcacaatataggaagtaaagttgaagatatgataacctacttagaaacatttttaggtgaatctgctaaggttctatgggaacaatgggttgaaaagaatcctaataattatgaagaattgaaaagagctggtagcaatccgcataattttgcaaatgttatatctaacattattatagctgaagatccggaattaggttatacaactttgcaaaatgaaaggttaaaagaaatagaaaaattaacgttaacaagttggaaaggcataaaagaattctcccaacattatttatataatgctacaactgctaaacaaggatataacaggggtatagttgaacgttatttcaataaattacctaacccactaggaagtatgatatttgaagaatataaaaaggaaactgaaggagctgaaatcaacatctctcaagccataacttttgtgtttaagcaactaagaaaaatatgcacgggtatccaagcccaaagatctatgaaacactcggattacaatttctgcaataaaatagttcaaatacccttgtcatatggagaagacaagcctagaagtaaaaagatttataaacatcaaaatagaaacaacaataatattagaacaaagaaaaggtatttcttaagaagatcagataatagagcacccttcttacataaaagaaatgtaagaagatataatccaaagaaaacctatgacaaaacatgcagatgttttatatgcaactcgccagatcatttaagtagaacatgcccaaataaagatcaaaagagatattctagtaaatatgaagaacaagagagggttctaattatagatagcgtaaacgaaaacatattagtatgtgatgatgaaataaaagatgacgaatcaatatattctatcatagaaacagacgaagttgaaactatcaacgaagaatatgaatcatccgatgaagagttagatttaattgacgaattagcaggtctaaaggttgaaatgatggatcaattaaattgtgaacatgattggattagaggaaagggtgactataatatcaaatgtgctttttgcatatattaccctagtcaagaaaatagagtgacttgtagtatatgtctaaaacaagcttgtgctgaatgtataaaaacaaataaacaaaaatggagaaaataaatagaattagaatcagatgaaaagactttatctagtagagtacgagtgttagaaaatagactaaataaactagaagtagaattagagaacctaaaaaataattgcgatattaaggcattaccagagaataaggacatacaaaacacaacaacgaagacaccattcagagcaaagcttccaggcgcgctctcaccctccattccaccgttcttagtagtagtgactttagcctaccttgcatagtatattgaagcaaggagttgtgttataacgctgtgtaaggtaagaacagcttgcttgtacctagcttcgggtttcccgaaagggaaaaccgtatgtaagcttatctgtttaatatgaagtaattttccttaagtattcctgcacgtttgttctagacaagtgtttatgctaaggaccctataggagaaacctcttcggtttgttctcttttttagcctgcatcttgcataggcgtctggagaatcggtatccgtagagaagtgttcccttcgggtggaactgcctggggagacgataaactcttagctagaacaagtgtgacttggaatatctttttaagttgcttctaaaaagacagataggtgaggcatacggtgagtaccgagtaatactgccaaaataattcaactaagagaggccataactaattttggaaataaatatatagtaagattgcctttcaaagaaatattaggtataagaattcctgttaaaataaaattgacacccaaagtatcttataaaatattagcactagtagacaccgggtgtacaaagaatattattcatgacaaatatttcataagatgtcctgaaatagttcacacaattgacgacaataaggcagaagtttccacagacatgtccggaataaagaaaattcataatcagttagcttataatatggaggtttacattaatgtaactaaatatataatagatgagattacaataagagatttgtcaatgattaatgatgacatgataattggcctaaggttccttcaacaatcagtacaaaccacagtaatacatgagcaaggaattacttttatcccatatcaaaataatgttccatatatctcagaggtacgaaagcgtggtggaatctcccccacccccaaactcgacaacttagaagtacctaatcttgagtctgaagaaagaattaatgaatatgagcttagtgagaatatagacaactattatatatcaaattccaatatagagtgcataggactacaagcatttgcaccaaattggtatagagatattaagtctaaaagggatatagaaaaaattattcaaagattagaagatatccaaattataggagaaattcctatgaaatattgggagaaaaatgctattgagtgtaaaattaatataatcaacccagaatatatcattaagactagcccaatagaagcaactccgaaagacatagaagaatttaagatgcatatagaagaactgttgaaactaggagccataagagagagcagaagtccacacaggtctgcagcattcatagtaagaaatcatgcagaagaagttagaggtaaatctaggatggtcataaattataaaagactaaatgataatactatagaagatgcctataatatcccaaataagcaagaatggattaatagaatacaaggtagtaaatatttctcaaaatttgacttgaaagctggattctggcaagtaaagatggcagaagaatctatagaatggactgcatttacatgtcctcaaggacattatgaatggcttgttatgccattaggattaaaaaatgcaccagcaattttccaaaggaaaatgcagaatatatttaacgaaaaccaagaattcatattagtctacatagatgacctgttagtcttctcaaggacttacaaagaacatattgctcatcttgaaatattttttagaaaggtggaacaaaatgggttaatattatccaaaaagaaaatggaaatatgcaaagaaaaaattaacttccttggacatgaaataggagagggcaaaattcatttgcaagaacatattgctaagaaaattttagaatttcctgatgctatgaatgataaaaagaaattacagcaattcttaggacttgtaaattatgctagaaatcacatcaataatttagcaaagttagcaggaccgttatatgctaaattaagaaaaaatggtcagagatattttaattctgaagacattaaattagtaagattaataaaagagagggtgaaagaattaaaacctctagaattaccattagaagagagttactttattattgaaactgatgcatcgcagcttggttggggtgctgtattaaaacaaaggcctactaaatattcatctaagtcagaagaaaaagtttgtaggtatgcttctggaagctataaattaaaaaccgtaggcaatacagatagagaaatacttgcaataatcaatgcgataaatgcctttaggctatatttagggttcaaagaatttacggttagaacagattgcgaagctatatgtagatattataatcagcttaatagcaagaagagttccactaggaggtggattttatttgaagatatcattactggcaacggatataaagttatatttgaacatattaagggaaaagataatcatttacttgatctactctcgcgattgcctattttgcaggaatgaagaagtccatgaattatagtggagttgagttcttcacatttggagaagacaataagctcaaagtattcccaccgaatacctataagtttaagccaaaaacccacataatattagatgaagtccaagaatgcattttagataatttctggtatcaatacaataataagagggaagaaaaaggctatatgctatcaatattaaacagtcttgctgaatatttccatctaataaatgatataatgccaacatcagaaaataatgaagtaatacagcaaaaacccatatatgttgtttttgacggaaagcttcctggagtgtacatatcttttgaagagatagtagcccaaaaaatagatgcaaaattaatgggtggattgtcatggaaaaaatatatagatattgatgaagctttaactcaggccagaaaaatattaggaataaactactacttggaaccagcagcaaaagaatatatacaaaaatgcaaaaaaagccaaaaataagaaagctccagagaacccatattgttcaaatattaagaatgaaggatcatcccaaaaacctacgtataaggaatgcttgactaagggagtagatcctttggatggcgaatatatcgattggaaaataattgaaaaatttgaagaagcatccccccaaattaaaaaagaattgaaagaagaaatatttaaagaattaaagaaagaaatgaatgataaatttgaagaaatgaaaaaagcatatgatgaaaaatttgaggtctccttttctgatgtagatactatggatttaggtggtcatgggcagcctgaccaataaagcaatataatataaatcaataataaatatcaattctttgggcgtgggaagactatatttgcgaatgaccaaagtatgaattgaatttgaatcaatccaaaatgcaaggacagtgaatgacatttgactgttaaaaatactgtggagaatattgctttcggcggaaaagaaaggcgcaggtacagaggtgtctccaccttggccaattcaaggacaaagtaaagccaaaaagaagataagcatctccatggtgcgagccagctcgtgaaaatacagtatctagaagataagcttgaagcacagtcgagcctcccgagctcctataaaaggaggggtttgcccagctgaggaaaacacaacaacgaagacaccattcagagcaaagcttccaggcgcgctctcaccctccattccaccgttcttagtagtagtgactttagcctaccttgcatagtatattgaagcaaggtaggctaaagtcactactactaagaacggtggaatggagggtgagagcgcgcctggaagctttgctctgaatggtgtcttcgttgttgtgttttgtatgtccttattctctggtaatgccttaatatcgcaattattttttaggttctctaattctacttctagtttatttagtctattttctaacactcgtactctactagataaagtcttttcatctgattctaattctatttcttttctccatttttgtttatttgcttttatacattcagcacaagcttgttttagacatatactacaagtcactctattttcttgactagggtaatatatgcaaaaagcacatttgatattatagtcaccctttcctctaatccaatcatgttcacaatttaattgatccatcatttcaacctttagacctgctaattcgtcaattaaatctaactcttcatcggatgattcatattcttcgttgatagtttcaacttcgtctgtttctatgatagaatatattgattcgtcatcttttatttcatcatcacatactaatatgttttcgtttacgctatctataattagaaccctctcttgttcttcatatttactagaatatctcttttgatctttatttgggcatgttctacttaaatgatctggcgagttgcatataaaacatctgcatgttttgtcataggttttctttggattatatcttcttacatttcttttatgtaagaagggtgctctattatctgatcttcttaagaaataccttttctttgttctaatattattgttgtttctattttgatgtttataaatctttttacttctaggcttgtcttctccatatgacaagggtatttgaactattttattgcagaaattgtaatccgagtgtttcatagatctttgggcttggatacccgtgcatatttttcttagttgcttaaacacaaaagttatggcttgagagatgttgatttcagctccttcagtttcctttttatattcttcaaatatcatacttcctagtgggttaggtaatttattgaaataacgttcaactatacccctgttatatccttgtttagcagttgtagcattatataaataatgttgggagaattcttttatgcctttccaacttgttaacgttaatttttctatttcttttaacctttcattttgcaaagttgtataacctaattccggatcttcagctataataatgttagatataacatttgcaaaattatgcggattgctaccagctcttttcaattcttcataattattaggattcttttcaacccattgttcccatagaaccttagcagattcacctaaaaatgtttctaagtaggttatcatatcttcaactttacttcctatattgtgctggttttgtatatatttttgaactattaaacctttccaaatactaataatattaggccaatcaatagggtcatgtgcggctaaatttaatatagcaccatcactcctctggttttgaaatttaacaggcttctcaaagtctcttctctttgtacccatatgcctatattgacctggtatatagttatatgaaaattcttctctatcagggggccattttcctgctgccctagctggtctttctctttctccttcgtttttcacagtaccttctccatatctttttctctttcctgttcctaagtccacttccatagcttccattgcattatcaagattatgtaaccctacttcatctaatgtgtttataaaatcattatattgttctgcattgtctattttattttctatgttctccatctcatttattagattaatttcttcttcataactttcaagaaataatctttcattctctgcccattgctcttcttcacttaaaattttaccaagattttgctcttctttgccatatctttgattcctattatatacataccttggtgaatatatttataccctgaatactttaatccattttcaaattccttagctacaatttttaactcaactggctttgttaaaacgcttaactctacttctctagatattctgtataacccatttttattctcaaaaaatcccatgcaatatatttgttgaggtcttattgccctcagagtatctctttgatatctttcgagctgtttgtctacttctgcaatatcttataatcctctagctcttttagcactgaatttaatttattactaacaagcaaatatatatatatttatatatatgtgtgtgtatgtagacacacacacacacacagatatatatatatatatatatattcttatattatttatatttatatagatattaataaatttacacacatatatatatatgtacatatacatacatatgtatacatatgtatatacatatatatatgtatagatgtatatacatatgtatatgtatatgtatatgtatatgtatatgtatatatatatgtaaatttattaatatctatataaatatatatatatatatatatatgtatgtctaaattcattagcatcaatatgaacgtggaagtattagtttttcgtcccttgatcagtagtagcacgtacttagttacggacgccgtttctgacggtgcaacagcagatgtctgcttcagtttgtggatgcttgtagtggtcaaaatgagttttaatatgggaaaggaaatcaaatgaacagctcgcaaatcgcaatcgcatagatttagtcacgtttgtagtatcgattagctcaaaaataattaggggagaaaagcagagacgtttcatatgcaagatcatgcatggggacgtgcgacgaacatcacccctctaccttaaatttcagtattggccttttaaattgctaaggatacatatttttatccataaatcattttttatcccaaataagttgattggcatgtaattagcccttggccaaccaatggggcttaggggcggaggtagagtatgggaaggggtgcttaggaacccgattaagaaaatttttagctatacctcatctattttcatcatgtgtacacactctcaatacagatttagatatccgtatcagcttaaacttgatctaaagtaaagtaaattaagcaagaggcaccctccatttttttctaactctgcacctaggggctaagtcttgagaaccacattgaaattcacaaaggctatgttggttcatttttatttttattccggcccatttcaaaacacacactcctatataaaaactattaagcttccattatttgtacttacatccaaacaaaacaaaattgtaaatgtatcgaacccttttctcctatttcctcaaaaaattgaccattgagtagggaaacactgcatttaaagcagtttttttagggaggggggggggtgggctggctaaaagggtggttaaaagaattcgttgttggttggacaccggataaatttagtctttttgacaacaaaccgagtgaaatggaggaggaagcaataagcaaactgatctttgtgaggagtgattttagaaaataaagacccaactacaattctaagacataatagcaggtgtggaaacaatatgcatattactcatttactcccctggatcaaattaaagagctaccttagtctgtgctgaggagtgaagtttgtactatagtcgttaatccccttaactcgaactgtacgtttgtacttagttttagataacgacgtgcgttcgtacctgaatctgaatgagaggggtgaagtgtcgtccgggcgtaggaattcattggccgggtggatcggcaccaaatttgaagactttcttcagatctgcacagctagcttatatctatatttattaaggagacagcttatgcatacagatagatttatttatgaatgcaaagaatatacataatagcatatagcatgaatgattgattgattaattaattcgtaagcaatcatatgacagaacaagaagaatttttggcagccaggatatatatatatatatatatatatatatatatatatatgtgtgtgtgtgtctagattcattagcatctatatgaacatggacaatgttaaaaaatcttacattgtgaaacggggggagtatatatctagcattctagctagctagatgatgtgaagaattgaggcttttgtcttctcgctcacatggaactttagctagctatcgaaattgaagaatcatatggatgcagatgcagaaacaaagtagccagaggaagagagatctgcagttagctagcgcacgaatgatcgatggatagatcggtgacatgtagtagtacgcacgatacgagtgaatgaacaatctgtgagtgagttagggcatgtttggctcagctaggagctggagcttagccaaacagtttcagtttcaactgaaatatataagggcagagctgggtggagcactctcacaaaatgaactagagatgtgaagctgggtttaggctgcttcacaactccactccaaacccaactactgaagctaaatttaggagttggaactctatcaaacaggctcttagagtatatagatgagtaatctttgataaagaaagtggtacttgctatacatgcatactcccttcatcccaaaataattttatttctatcctcttacctccactcgattagtaagtcgataagctttattgtttcaataccttttaactatattttaaagataatgggataaaatccggcctttgctaaaaaagctacggccaattattacacatattcgtctctaagagatttaacaaaccataaactcaaacaaataagcaccaacacaagataaagaaaccccacaattattgtatcctactcgcacattaatattactttcccattaacatgttataatttagtttttttctctctaatttgttttgcacacacaagttctaaagataaagttattttaggtctgttgtttttgttcatgttgattgtctgtcctgtgatatgcgttttgattcacagaggggctcagtcataatattggacccaatgcaaatggacattgccgctgatcttttatgttgaacggttgaatggtttaatagctgatgtcatggttatggagggggtacaaatgattaaattactattataaaatagaaaaaatgatttaaaaaattctctgagaaattcatatatagaaaaaaaattaaaagttataaagacgtgaaagcgtgaacatttgtccattcatccgttaaggagcaatataccgaattacatagaattatttcaactcctagctactccgattatctgacatatataggcatgtccttttgtcttaattaatggaatggaatataagaatacatacacttgttaggctcctaaacggtataaattttgcaaaatctctctacaaacaattttttgaaacacaatttaaaatctacttaaatttatgatagttataattaattttattagtccgtattctcgaaacatttgtctatttagctaagtagtattcagcagtccgttctattccatttaggccaaaataacacccaggcaggagggcatgcacacctaattaattaatcagataatatagtagctagccagggagtagtttgattaattaatctcctgtcacatcttgctacgctgatggttaaccaaattgctaaatcccctataaatatatataattttatactacgaatctgcccatttacactcaataaattatatgggcgacgatcatatccattaataatcaagtagaaaagcagatcgcaaataaaggcgacctaaatgctaaacgtgacaaattgtcgcaagtatctttcacgtacagttttttttaaatgtctcattattttctaatatgcccttgttaattaattccttggtattatatatttttttgatgaggaaattccttggtattattgcactcaagaaatcagatactcaaaattaacaagagaagcaaagcttataacttataagttacatatttataacggcggtaaaaaaaatattaatcgtgccgacagataattactcgcggttaaaaagaaatcagaaattaaagcggaggtactttgccacgtccgcaagtaaagcaaaaggcaagcaagcagctgatcagaacttcatggatgctcatgagaatcagatcgataaatagaataaaaaagagagagaaaagagacaaaagaaaattaaaaagaaaagcgtaggctatcagtgatcagtcagaaggtgccatgaccaaattttgtcacttcctcctttccagctcccacgctcttcctccatacgaattcattaccgccactgaattaatcaatcaattaagtagtagtatttacataatggagtatttgtgtaatatacttccttcgtcccctaatataaagtattttgacattttacttgtactatttgaccattcgtcttattaaaaaaaaattagaattattattttttacttgctttactatccaaagctttaagcacaacttttcgttttttatatttgcacaactttttgaataaaaagagtgatcaaacagtacaagcaaaatattaaaatcccttatattaagagacggagggagtaatctagaggagaacttatgtaatattaccatcattttttagaaaaactttggcaatacacattcggttagacatagatgttatgtttttttaaaaaaagatatttttaatttagactattcgttatttctaaatttttttataaaaatagacaaacataatgtgcttttaaaagtactctttttctataacatatttagggtgcgttcggcactgcctttttttatcttcttctatttctcgttttatacgtgcatatttttcaaatggttaaaaagtgtattttgttaaaataattatagaaaaattgcttgaaaaattatattaatctattttttaagttttgttagtcaatacttaattaattatacaccacaccaatgagttacctcgtatttcataggtggagaagttcccaactcttctcgtggagacgtggacacagccttggggatactcttttcagtttaagtagttgaataaataaacgttggtaaaaattcgaggaaataaaaatcaaatgtgacatatattaagaaacagtggtaataaaatattttatctaatgatttgagtggatctgccgttacatggtgcggcgcccaacgtgtagatcacaatgcaagtagatttagtgggttttatttggtcaaatttggtttatctgcctcactctagcatgcatgcatacgagtgatgattcctctaaaatacgtactttacatgattaccgcgaattgagagctacgtgttaaccacaaggaccaagagatcgatcgaccaattagcttagcttggctagcagatactctcgtgcgccataacattagtccattaattagaaagttaatgatcctattagggtaaatttggaaaataccactgcaaagatacgtgagttgcaaaataccatcgtacgtgagaatgacatgtggggcctggacccacatgtcaatgacacatacgatggtatttttcaactccgtgatttttgtaatggtactagccaaattggcccattgtattatggatcacactttgttaattaacacacattccccatatgcatgtgtatgtatgcatgtatgcatcgatcgatgtggggcccgaggacagggacagcacggctaccgggcccacccgcagcttcgattctccctctgtcctcaaaggcatgatgcgatgtgccatcggttcatatctctcttttttggtcactaataaccctcctcctaatcaccttgtcaccgacatcgatcaccttgatcgatgagaaataagcacccctgcaactaatcaatttatatttttgatgactcaactaatcaaattgaaacttacacgccacaaaaatataatcaattggagcttgaaagtagaatgcacgatttgggaaatattctgcaacttcaattcattgatcatgaattgtgagaacttgttgcgacctgcaaattttgttgtatgggggaaataagatgatctggttgaactttggcattaatttgatgttcgcatgcgtacctgtatgggataaatttgacagatgtaattatagtacaatcgtagtgtaattacactgtaacttatatgtaattgcactgtaacttgcatgtaactacagtgtaacttgtatataagtttcacgtaatttgaagaaaaaaaatcacagcacacacatatgtgtaaggatttgttcccacaaccttaataacatattacagagagatttttaaaagttacatacaagttacactatagttacagtgtaattacatgcaagtttcagtgtaattacactacgattatactgtaattacatctgtcaaatttttgggagaaaatttatcgacaaatatatagcaaaatcgtacctgcattgctttttgtttagactctattggattttcgcatgggcgtatatacctgttctgtaatttatcataaaattctttactagttaccaacttactattgacaagcgattgatttctactataggaattatcatcaataaacatgagttataccgaatagtattgctgtattgcacgttgaacagacaatctttccttcgcctcaagtgcacttagcttcacactgtacacgtcataaaagccctgagcttaggcagttcttcagacatttaagaagtaaaacagacataattttatatggtttagcgaaatgcaattgatgaaggctaacagctatagctaaaaaaaacacatgttggcgggtacagtactcctcggtttttaatatttaacgtagttaattttttaagcacgtgtttaatcatttatcttatttaaaatgtatatgtaaatatggaaaatataagtcatatacttataacgataaaacaaacaaaaaatgataattatgtattgttttaacaagataaatgattaaacgcgtgttaaaaatgaactgcatcggacatttaaaaattagatagggtatttcgtaaaacttatgtttatcgaaaaaacattgtattatactaaatctgcactatatatcgtgcgatggaggaaatataataaattgtcgtgttgcaagtcaatgcattgaatcacatatcaatacagtatactagtactccactctgtattaccttgatgatgatgatgaagaacgttactctaattagtaaaactaccgtccacgtcaccacccaaccccaacgtacccagcgcccaaagtcagactcagacagcccagaccagacatggcgccgcgcgcatgcagaaccgtgactctctgcccacctggccccacctgtcatctcccccacaccgacgctccccccctctcccgctcccgctccgttaaactctcctggccccacctgtcaggcggacttatattagtactactagtaccagtcctctcctcctgacagctaagcaccaaaccatcacttcactcccctgagctcaccttgatcaccctcctcgccatcgccatggccgacaagcctccgccgccgccaaccaagcccaagcccaagccggctacggctgctcaacccgcgccggcgccggcgacggcgaggacgacgccgccgctcaagaagccaccgccgctggccccgcccacgcaggcgcgcccgctcaagccgccgccggcgcaccagtacaggcagcagcagcagcagcagccggctaatcggaagcggcagtacgggaggcaccgcggcggaggcggcgggtgctcggggcggcgggtgtgctgcctcgccacggggttcgtcctcctcgcgctctgcctcgcgctcgccgccgcgtgcctggcctacctctactaccacccgcgcccgccgtcgttccaccttcagccgctcgccgccacgcggttccgcgtcgggaactcctcggcggtgtccgccatggacgtcaccgccgccgtcagggtggtgtcgtggaaccccaacgaccgggtgtcgttcgagtacggcgacggggagggccgcgtggcgctcgccgacgccgacggcgacgtcgcgctgggctgggcgcccgtggccgggttccgccacgcgccgcggagcgtggcgacggtggcgttcgtggcggcggcgaagggggtggtggtcgacgaggccgtggcggcgcgcgtccgcgaccggtaccggcggcggcagctggcgttcaaggtggtggtggacacgcacgtcggcgcgcgcgccggcgcggtgcgcaccggcatggtgcccgtgaggctgctgtgcgacggcggcgccatggcgccgcgcggcggcgtgtccgggagcgtggtggggcccatgagcaagtgccaggtctacctcttcagagtcagatggtcagtgacttcactcttcaactctccgtctctcccttgtgtttgtttctctacctgcattgttgcttcatcgctcatccaagtttttattacaacttgtattctcacgtatcaaccgacaaccataacaatatacatgaatacgtccacaggtacaattttttttttcaaaaacgcatgaacatagaaaagcatgagaattataagaattaagtagcgtaccaaggcttggtttagttcccaactttttcttcagcttccaacttttccatcacattcaaactttcctacacacgtaagtttctaacttttttctttaaacttctaattttggcgtgaaactaaacacagcccaacttgaatcgtaggcaattccaaaacgcacaaatctttcgagttgttatgaagcctcaaagaaaaatattaactgcaagatttgggagtgacaaagttaatttcaagcagttgaacgtcgtgttagaaatcgtccaaaattctgatggtgtttaggtaattcaatgggattcctattagttcatttctttgttcgaaatgaccacatgagaaaatttcccatatactaattcgtatcctatgaaattctttaaaaatcctaaattccaaataaacctctgaattcttctcactaccctcagttactgtgattttcctgtcatttactcatttacattaacattggttgtctctctcaatttacagaaccaattttgctttgccccattttctcatctctcccttgccacatcatcaatatcaccaactcttgttgtctgatgaaagctacttcttctgcataacacccatgaactaaatcctgcatacctctgctcattaaaaccgctgccattgttgctacacacatgaatgtacaaaacaacaacatccccaaattcaattttggcatcgcaaatctgtcttggtcccatctgatctgacacacccagcccaagaaccatccacacaaacccaagagactactcctaccaaagatcacaaggaaagattccaagaggtcaatatgagaattagaattaggacacaagggcatatgttggcagtacggccatgagatgtcattgtcctgtatatatatgagagagagagagaaatggggggccctcagtaattaaggtagcaaagactacacattttgtgccgcacaagatgccgcaggaggtcactggctgctacagtgggatcaggtagatccgtggattatacaacggtgacgccgcatctgctgcctgattatcagtgagtggccgggacgcctgtgtctccggccaaaagcgtccccccccccccccccccggattctctctgtccctatgcttacctcgcacgcatccaagcgcagtccatgaccgcgaaaaaaaagaaaagaatcatccaaatagtcgtgaaaaattctgaaaatgatctcgattgcgtgtttgttctccgtggagtaaggaatttcactcgtaagacgagtgttgttttcggtaatattcaaatagttatgaaaaaaaaaatcagagaggataacatattaccatataagcttagtttttgtgtagtaagaaattttgctcctaagtaagtcgagttgcgcaattcggattcgggtactaaactggggaggagggggggggggtggagctcaggtgttgagctgtacatcgacggatgttagcgtgtcactgttgctccaacttgctgtcctccagggtggtgtgccagaattttgacaaatcacaagtggagatcccacttgggttgtgtcatggtagctaccatgtaatactacaagaggacaccagattttgccaaatgacacaagctttggtggaggagtgggggtagcatatatattcaggcatttagggacattggatcctagatgagaggaacatgcatgattggtactactactggctagcaaaggaccagtgtctaattaaggctagtacctacctagagtggcttagaagctgtgtgatcagggacacttagtgacaggacaaggttgttggtttcagcaaaatgttctgaaggagatcaggaaattccagtgaaaaaggttttactttgaggcaattttagctgcaataatgcaggtttcttatcaggcttccataggcaaaggttcaaaagtatgtatcaatttcttttttcttctgacactataatttgatccaaactgttgatggcttgcttagggaagtggtatggcataccagctaaatgttgaaaatacatgaaaaccagggtgtagaagtgaaggagacttctgttcaacacagtaccaaacaaatatctgaatttgcattccaagcatgcataattcattatctgaaaaaatagagtaaattccttgtgtgtgcccctgaaaagttattcaatcccttacatgcccctgaaacttactcgattccttctatacccttgaatttttgattggatcccctacatacccctaccgttagattgagcagcattccctggttagtttggttgaaaatgtctataatacccttgaggttggaggagctgaaaactaagaacatgtttggcagctgggtttgaaacattcatgattgcacagtatgtattccatgaggctaaaaaattagtgcataaaattaatttcattttcttttgttatagcattcagtattttataaaaaaatataacatgatattggatctttcatgaccactaaccgacacagcctgggggtaaaagacagtacccctagccgtttactcaaacaccattgcaattcatcagcatatcaagaggatcggtagcaccatttaataggaagaaaatgaaaatacatctaaaagcattcatacaccatcagcagtacacaaatatattactttttacatcatgagcataatggcacaagcccataacagttcaaggcatccgcctgcataaagtcaaacaaatcaatcaagaaacactagcagcagcagctattcgcattttgctaatcaacgcaagggcgtatcattaccgacggcgaggagcagcggagcaaggaggtaataggccggcgtcggagcccccgagaagagggtgaggtgacaagagggagggcgcggaggaggcagggaggagatggcgtcgccatgaccgcaagcagagtcgaggccgcggcgggatgcggactcgtcgccgcggcgggatgcaaagccgccgccgcccaccagatgcggaccccgccgcgccactgatgggatgcggacctagccgccgccgctgaccgcaagcagagccgagaccgcggcgggatgcagagccgttgccgccgccgggatgtgggagaagggcggcgatgcgcgtgcaacgatggctgaaagctggcgatgtgcggcaccgtgcgtgtgggaactatactattttggaggatttggggatcggatgtggccctgtgttacctagggttgacaggggcattttcgcattttatgaaaatactgacaagctaacacacacatgaacacaaacatctgacggaacccaaacggtaggggtatgtaggggatccaatcgaaaattcgggggtatagaaggaattgagtaagttccaggggcatgtaagggattgggtaacttttcaggggcacacaaggaatttactcgaaaaagaaaaaatagggcatattgcataatttcattttcttttttgtacattgtgtcttgattgtatgaaatgagaaatatatcttgctcatcttgtatccatggcaatatggcatttcaaacagattaaaccatgtgaaaattgggctatgcaattgcttcaagtaattgaactggactttctacgataaaatcattttcaggtttagcttgaactgaagggaaatccaggacaggagttgccagtttctagcttcttacaatcaggctaatgtcagtggtgtcgaagctgctgctgctgccgtaacttatttgcatttcctgccgcgacgggaaggtgatgatttggttttgcttggtggcgaccgtgataagactgtcactatatataatctgaatgatctctgaagaacctgaaccttgatggtatttttcgaagcatgtaagaaagagaagaaagcgaacaagtttgtaactgtatatgcatgactcctagctccccaaattcttttgattgtgtggtatatatacatacatagcaggaatggaattgttttcttttgtgtgttcatagctctccaaaaccctgttccttttttcttttagaaacaaccctgttctttattttaagtggccgtgtggtacatgttttactactagttgttttgatccaactagaatggtttcgacgaggagtatagagagagagagtaatttcatatgttacttagttaagatataacattggagatagctttaccattgtatgattagatgaaatctgcattaacaagtcatttaaccactctccataagttgtagcaaggcaacagatacacgaggggaggccatttcaatatacaggtttaatgggcttggaccttactgttttatttcctgaaggaaataatttcactttaggtccctcatcttgacgtcgagtttaaaattcacctctgaactgcaataccaggcataccccaacttacaaaaccggtatcccctgaaaaacaagacgcgggacttaaaatgaacttattcctttcctgaaatgatgatcaagtccattgaacttatggccttttggcccattaccaagagaggtaatcccaaaacccaaacggtttagcccacggtggtgagtgagaagagattttctttgataatggaatagaatattccggcctttgctcaacgaactacaaccaattattatagagtagcacacaaaataaaaagcttctcacacaaaaaagaagacacctaccaacgcaagataaggagtacacaattattaaattctgtttgtgaatctccatcaaaaattggtaaacagttgcataaccgttgcctcaagattacgacatgcaacttttaaacgctcgccctcttcatcacacttttgtagcagtgcccaagacctgagccaatgtattgccctgaaaattactttgccctatggtgacgaaattaaacaaaattgtactatgcatacaaaacagtgaggaagaaaattgctggatgaagtgtcctattttttttccaagcgaagtgttataaccttgtcctatttttttccaagcgaagtgttataaccttgtatgaaaaagtgaacccaaatctttcagttagcaaatgggcttgtttggcagtgctgctttgcagctagctgcaacagtagctgggttgtacctacagtaaaactggagaaaattttccatgtttgctgcagctgcaaagcagccacaacaatctctgctgaaaaccccaatgatacgactcagagaagcaggtcgataagtagaatttacttgacgaagaattcctctgagctgggtatcttttatctcttgaatttgtaattgggtggctcatgaaatggtagtattagggaacaaatatgcaattgatggcgattttgtaatgcatggtgagcctgcttgtcttcatgaattggtagccaacgatttatcaaataaaaagggaaaaagataagtctgaattaccttctgaaatatcgaggttatctgaggaatccataaattacagcaccagatatttcactgtccatagcttttcataccagaatatcttaaatgtattatactacattcgtcccaaaataagtttatttttcaccaatcacacattctaatacaaaagcaaaaggacaaactaaaatactcatactttatgaaaccctaatgaaactattcattagagcaggtacaatagcaggctattagctagccataaacatattttaatgatataaacgatgagagagaagagcagcgggctacagatctgtagccagctgcagcacggactccaagacacactgtgtatatgacaggtgggaccatatactaatagtatagtaagcaactattgtatgaattggctattagattggctatagatgaattggagctggtagtgggctgtactattagacttgctcttactttatctacttctaatacaattatgatgtaatgattactttaaaaataaacttattttcggacaaatgaagatagctaaaaataaacttaatgtgaaacggatgaagtatataagtattatagttgtagggtatctcaaactacctaaatagttgaggagtaatttagatttttcttttaaaaaaagagtgaagccaaatcctaagtgtgaatgctataacagaacaaaagtctgaataagttatcaagtactcaagattccgaaattccataaacagtcgatgtgcacggtttatatattattatatctctcattttgcaaatttaagttgtaagtccgtatttcgagctacagtcccagaattagggccccttttttttttgaaacacagtacaaacgcaggcgctcacaacgtgcgcacactcacccctatgaacgcacacacgcacactctacccctatgagcacctccggaagactgggccggcatatcttgagattgacgaagtcaccacaggcgcctcgctgtcgacgggtacgtcgcctaccactgaaagaataattagccgtaaatgcgagcacccgtgtcaaatctaggatttaaacccgggtgggctggttccaccacaaggaacctaaccagttgagctatgctcacttcacagaattaggcccctttgattcaaaggaaattcataagaattttaaaggatttaattcctataggaattttttctatatagccctttgaatcaaaggaatgaatcctatggaatcctataaaattcctatggaatgcctcttcccatgcaaattttgaaggaaatttaacatgaggttctacctcatgtaacctcatgttaagaatcctttgagtctttctctcttcttaaattcctatgtttttcctgcggctcaatcaaacggtcattcctatgttttttctgtgttttgcaatcctctgttttacacttgtatttctatcagagtcctatgtttttcctatttctccgtttttttattcttatgattcaaagggggcctatagaacattgcggcctgtccttcaaaattcacccgccatcgttgttcgttgagcatttgagtttgaaatcaccaggcaccatgacaccacacagtagccgtgcaacgaatgttcaccgcatagcaagcaaagtcgtactagtacgttggtgcgtgcgcccctccgccgtccaccgaaaaccgcgtggacggccgctacttaagagcaattttttatagtatagctaactattgactattagctcctgttggagacaataacacagtacttcctccgttttatattataaggctttctagcattggccatatttatatatatatgttaatgaatctagacatatatgtgtgcctagattcattaacatctatatgaatgtagacaatgctagaaagttttataacctgaaacggaggtattaagtatataataggttaactgtaagatttactctgtttatttttctcctctctatttctttcactataaatttcatgtaaatattttgaagattatgtaaaacaatctattgtatgagaaccaaaacttctcatctttttctctttcttttacataagcttatattttctccgtggctttgtcttatattttaagagattttaggtggacgtaacatttcctacactccggtggtgtttggatctagagactaaattttagtccctgtcacatcagatgtttggacacaaattagaaatattaatcatagactaatgacaaaacatattccataaccctggactaattcgcgagatgtatctgttgagcctaattaatccatgattagcctatgtgatgttacggtaagcatgtactaattatggattaattaggcttaaaatgtctcgcgaattagctcttatttatgcaattatagttttattataagtttacgtttaatacttctaattagtctcaaacattgatgttacaggcctaaaatttaggtggtgtttggattcagggattaaactgtagtccctgtcacgtcggatgtttggacactaatttgaagtattaaacatagattacttataaaactaattacataaatgagagataattcatgagataaattttttaaacctaattaatccataattagagaatgtttacggtagcatcagataagctaatcatgtattaattaggctcaatagatttgtcttgtgaattagttcgggttatgaaatactagtaggttttatcattagtatatatatatattttgagcgaatcattagtacatattcaatacttctaattagtgtcagggaatttttttttttagcacctcccgtctcctcattcctcaatcgtcatcctcctcccaacccacacggtccagtcctcctcctcgcgtagacgcggcggccgaggaacaagtccgtcacgcgaaccttccagaacctcacacgtcacgcaacctcctcctctttattacgactactaccaccccctctctcctctccgttccaccgccggattcagattcggagagagctactcctcgtcgttagccatggcgtccaagcggatcctcaaggagctcaaggacctgcagaaggatccccccacctcctgcagcgccggtgagatgcatatccctctcatcacctttttttgctgcgtaattaagcttcgatttactagccgtgctgtgcttctgcttcctgctcgatcgatcgattccatgcgcgacccgtcgctagatctgaggatcaggtaggttggtttgctgttggtgtggacgagtggatgatgatcttgttgatttctgtgcaagtggagggggtgcctgtgcgagccaacccggattttctttttcagcctttgatctcgtcaaaactcagaaatttcgatgataacgtagtaataccgctttttagtttcacttttaagtaaacctaaatgtacggcacatcgtataagatctgcaatccttagctttgaaaacaagcgagaactgtattctgtagcccaatgcaatatcagatcagttaaatttgcagggagaatgagctgcgtagtggctatttatgcatcacaattcagagagctaccgaaactttatttaagcacatggagatggtccagatggagtggcttactctgtaatttttaaatggttgattgttcacggataaagagtttttatccccctactttgggatggctggtcataagatcactagctatgtttaactttgaataagtctaccaactaagagcattggtatatgcattagggcattagtgcttccaagaacagaacaattacgcataccatgcttgctcaattttaaggacaatgttctattgtatcagttcacttacttcctatatactccgtatgttggaagttggaataagctaggtgtttcatgctctgctggaagatgtaacaacctgtcgtactagtattcctttgatcttcattctatacaaatgcttccttagttgtttacgtatacgactgacatgtatgtattcttaacctaccaggccctgtggcagaagatatgttccactggcaggcaacactgatgggtccatcagatagcccttatgctggaggcgtgtttttggttaccattcattttcctcctgattatccattcaaaccgcctaaggtaaggaaacattacatcgtattcaacctacatattttaagatagcttccttgttgcaactatgaatgctggattgttcaagtgaatgggaaaactggatactgtgaaaatcttacacaagatcttttcctggaagtttggaccttttaggcgatagtaggtgtatcaattttctgaagtgggatatgataggaagtataaactgtgatttatgaaaaccattggtaggttttagtgcatcaatatcaaatgctgcgtccataccgttgaacatgttattctaagcacatgattgccttttgaagatgagagttaattgtgttcattttagtggtgtaggtggcaattctaattaatttcacctttacttccctgttcctgttctggtattatgaaatgttgtttggttgtccttaatggaagcagtcatttgtttttgttgcttctgtattgtgcgtccatatggttgaatgtattattctaagcgtgtgattgcctgtagatagttcttgtgcaagttttttaactttaatggtgtaggcagcagttgttccatttaacttcacttttccttgttcttgttcttgcttagcccttacagaaccggtcatttgttcttcttgcctaagcagaatcagtcctttgttaattttgctttagtagaacaagttatacaattatcggtttgtttgttcgtgagttttatcttctcatgccacaagtgagatgtctttagtgcatggtcgtggcagagtgcagcttgtgatctggtgtcttttctggataaatgtagcataagggtgtgaaaacatccttgacaatttctgaacctaaaggcaattgtttcccctgaaaaaacacccttgtttaaaagtggcgccaactgcaatccttgtacagagttatgctttggttattcattggcaatttggtaccaaagtttgtcatatagaaaaggtctcggttgtacaggacctagatgtttctcttaactcaaaaacgtaacggttcatgattgggaatttgtagttgggactcagagttccactaccttttcttgctcttttctgtcttaagtttaattatttttgttctacagaacaattacaatcagtagtaaaattttcaggtggcattgaagacaaaggtgttccacccaaacattaatagcaacggaagcatatgccttgatatcttgaaggagcagtggagtcctgcattgactatttcaaaggtaagtttgttcctaatatgatgaacaattgaagtaagaaaggagctgctccctccggtcataaatatttggcatttaacataagattttggacagatttttaaaattttgatcatcaatagtttcacaggtcctttgcttaaaacaaggacaaaatggtatatggatttgtctaaaaagtatcatcataatattgtaaatatgttatattacaaatttgttctgatacaaaattgatggtcaaagttttaaaagttttgaccgaaacttgtcctaaacattgacaatttatgaccgaagagagcataaagcttggtagtcaatcctctgttcttgttcagccgtgttcgcaatcccacgtgcaccattctgggtttggggcatatgatggacactgaagtagttcagttcctctgatcttgttcagccgtgttcactatcccacgtgcaccgttctgagcttttggggcatatgctggacactgaagtaaacttcagttctaatatcttccatttcatttaggtgctactctcaatttgctcgctgttgacggatccaaatcctgatgatccattggttccagagattgctcacatgtacaagactgatcgggccaagtacgagtccaccgcaaggagctggacccagaaatatgctatgggctagaatggttaacaataagaaatgtgagatatgccattgtattgccttgtattctcctgtaactctttcaacatttaagaaacagcaagaatcaaattgaactctcgagttgttgtatggaatcctactatagatgttcagctattgtaaattatgtagtgggtggttctattgattgttcgatgagcacttggaatggtacttttatgttccagagtaactgtgacaaaatagtctgtattgatctcctgaaaggctgaaacccatcttggactgtttagtgttttattaatttcattctagaattagaaattaataattagcactatttactgttttattagtttcattctaaaattcgaaattaataattagcaagtttgtaactaacgtggactcctttttttaattgtaagtagctataattcaaatgtacagcttcattttttgcttattggtttatcagtcgcaaattaaaatttaaaaatttaaaacctaattttaaagttaattccgctatttgcttgccaaaaaaaaatctctcaattctaatgtccctattgatcaagaaaacattatttccattagttgagcgcaacaaacataggcaattgttagatttgaaatatgaattttgaatggcgaaagcagtaactccttctcatggcatcctggacccatgttacaaacagagtcctgctctatctttagtggcaggtgatcctaaggccatgtatagatgggattaaaacttttaagtccctatcacattggatgtttggaaattaattataaatattaaacgtagactattaataaaacccatccataatcttggactaattcgcgagacgaatctattgagcctaattaatccatgattagcctatgtgatgctacagtaaacattctctaattatggattaattaggcttaaaaaaattgtctcgtgaattagctttcatttatgtaattaattttataagtagtctatatttaatactataaattagtgtctaaatatagggactaaagttaagttcctggatccaaacaccacctaaaagctctatctttagtggcaggtgatactaaaatttcaccttattactcagtggtagtacaactgaaccaaaaaaaaaatcaataattctgtgcttaatcaggggacaggcagagaaggatttcagggtggaggccgtgacgatcggctgtgttcagcacaagaatctggtcagcctactgggtattgcagcgagggagctttgtaggtatgcatggtgtaattttaatacgatttttgaaataacaagttgtgctctctgtacaactttactctgctagtgatgtgtaaattgagttcttgcaatttttgataggaagctggtgaaattgagttgaccaatttggactgaagaagtgatctcagataggggggttgctgcctggaagagtaggaaaacaatgcagagagagatggttcaaccctttgaggccaaacatcaaggttagtctcctcttccttgtaggtttcacacacattgtatatccaactaaaaatacttcttttgccggcatttcaaaattcttgtcttgtatacagttaagatcacttgatttgtctgatagatctgttgatggcatgtaggcatagatagctgcttagtcaacccaataaaatgaggctataacaagttctatcattgctatgctgcatttttgccaagtctgcaatctatcaatcttcatccgccgagtctctgaacataaattactacatctatagagggctcaatttatctttagctagacaatctattagaagatgatgagggatttgggactcttgtcatctgttaatgtgttatgcaatctccttccaccagctaaatgaagcatgcgagcttctttagattgattgtttcagactttcattatcttagattggactcgtgcaatgtctaatgcaatgtttttttttgtcactgatttttgaagggaacgactccttgcagcctctgtgctgcatcggccaccatcaccggcgagcctgtggcccttctctttgtgccatcggtgccacgagaacatgaagaggccattcgcagtcaccgcaagaagaattagtgtcacaacaacaagaagcatgagcgccttcatcaatgggggacagtgagatccattgcaatggccatggccatgagaggatcctgatgtcatctgccacgatatgtcagcactgaatggctgggggcctgtcggggttgatgaggtcggccggactgcacagcctgagagcaggcagaacatattcagatgagtgttgtttgcaccttgcaatccaccctgcagtttcgctaattcttggggaaaatgatgttttgatttctgtagcaacagctttaatttgttgaacgaatggatcccatgtattttttttctgggctttgaacaacaaaagcacaaaaagggacagaagcccatgttcgacccaacaaaccttttggcaggggtgcttgatgcacgcacagcacgcggggaggaggtgggagatgatgacacgtgtcatatcctatggtcaaaagtccagctgatatctcaaaaaatttcagcaggatggtactagacagtccctaagtggtacttaattcgtttcacttcagtaaagccgcgtataatatgcagagtccagagtataatctgcatcagtagacctactgatatatgatggctcagtagcatcctgtagagtttataatgtggcaaatgtctgacgacataatataactcctcaaaataacgttaaattaatttgggacctgcttttgcatttgcttcctcaaatcaaattgtttcctcgagttcaacatagagattctgcagaacagttattacagtccaatgcattttttttccaggtggtttccaagacaaattggtgttccatcggacgagtaatgcagccaccatctgtcgttatatcttgacagagccgagaaggaaaatcctccagagattggccaccatttgcatggtcagttgattctccattaccctacccttcttgttcctatagaagctcagaagcgggcaagcggcttgttttgcgacgcaccactgacactgtctctgttcatcactgcagcaaccggatggcgagcaaggcgacagagatgggaatttttttcgtttttagattttttttaatatttacagaaataatctatcggcgagaaaaattgcaaaaatagaccctgccgccccaatggtgggcggcaagctgacgtggcaaacgggggaggaacggacggtgacggagggtggttttttttgcatgaaaacccttgccgccctttggtggggcggcaaggggtccgaatgcaaaagagccgcaggggccggccattttgcaggcggccccttgccgccctctggccgggcggcaggccttgctgcctataaaaggtctgccgcccagcccccagccctcattcctcacccctctcaaatccagtgaaaaaaaaagaagagaggggaggagaagagaagaaggggcgaagccctgccggatttagacgccgatttcaggtaatattcatagatcctatatgtgactattgagttaaatagtgtgtatttttaaaaaatttgtttgaataaatgcattatatttttagggtttcagttgtactaatctagaagtgcgtattgtagatatcggtaactacgtagatctgctagtttggaatcaatactttaccgttgcattggcttacacaagaagatattacgttgtagatgtttattgcatgaaagagtaatatgatctagttaattcgttgacagatatgtcgaacaaacaaatattccaagtttaccatggaccaggaaacgtccattacgggccaactggggtagatctgtcagattttattgtatcagaaaggggaattgatagaccggctgagaggagtgtaccttctataaaaggatggttaatgaggggcttgagagttgatccacagacaagtgacataacaatcaatgttatagtaagtcgggcaactgagggtttttattaggaactaatgccagttcaaaactctcaagtgtggagatggtatgtggaaaatgcaatgcaacgcgggtggcctctagctttggttccgtttgtgcacccgaaggatccaggtatgcagatgaacatggatgatggcaagggaccaagtgctgaagtaaatgagacttctgtggaggaggtcaacgcaggagaggacaggggcgtagtagctccagtgggcattcaaccaggtggagtggccgacaagggggagactgtcgcagccattgtggatgaaatggagagggaggattctgacaacgagcgtgtagaggaaggtgattcgtcagatgaggagacggatattaatccagcagaatgggctagttaggatttttctgggctgatcgtctctgaagaggatagtgtgagatgggagtacaaagaaaatgaggttattcagggagcgatttatagtagagcagaagatatgaaggaggcggcaaaacattttgcagtgtcacttcatagagagttttgggttgccaagtccaaccggtcgcaatatgaagttcggtgtgttaaggaaaaagatggttgtccatggagagtgcacgcgtataaggggaaatggaaggattattggacagtgtcagtcgttaccaagcatacatgttttctacctggtgttcagaaataccacaggaacattacatgtgcatttgttgcatctgagatgtatgcgcatgtcatcgataatctcacatatgaaccaaggtcaataatccgacacatcgaggagacatacaagtatactattagctatgccaaggcctggagggccaaacagaaaataatagagataagatttagaacttacgaagcctcgtatgacaatttgccacgcctgcttggtgttatcgaggaaagaaaccctgggagctcttacgaagtgaagaaattcccatcaattgaacatcctggcaagagtgtgctgcaaagggcgttcttagctctacatgcatgcaagatggcattcgtgaactgtcgtcctgttctctgcattgatgggacattcttgacaggaaagtatcggggccagatactgacagcaataggggtagatgggaacaatcaggtattgcccttggcatttgcttttgttgagagtgagaataccgacagctggtactggttcctaaaattggttaaaacaaaagttgttggtatgaggccaaatgtgtgcctgatacatgataggcacgctggcattctgcgagcgatagaagagttgcagtttgggagcatggaacaaggataccctggtgtttgggacgatgtacagagtaggtggtgcatgcgtcatatgggagctaatttcttcaagcaattcaagaacaaggagctcatgaacatgttcaagaggctgtgcaatcagaaccaggagaaaaaattcaatgagctttggaagagattagatgagttgacagccaaatgcagtgatcagcgtgcagcggctccatcgaccgccgttgctgaccctcctcaagctcttggacctctcccaacggtagtccaactttggttagaagaactggattggagattaggaaattttctcagtggattctgcatgaaccaaaagagaaatgggccaaggcgtatgacacaggtggtgctagatatggaataatgacaacaaatttggcagaagtttacaactgggtgatgcgcggtgtccgtggactgccactagttggcatagtggagttcattttacatgggacatgcaggtattttagggatcggttccaggcagttcttccctctatgccgaacaacagcatttttttggaactttcatacagaaaaagctagaggagttgcgtaaaaaggccatgaaacatcgagctctagtgcaaggtacccaacaacacaggtttgagatactctgtcaagataaggcaggcaggggtatctaccacaagagagtgaagcaggagtgtgttctgaaagccgacgacacatgtcattgctcttgttcaaagccgaagctgctccacaggccatgcacccatgtcattgctgccgcagcggagtgtagcataccagatgtagtatatgtgtcacagtacttcagtaagcaagcaatatattatacatagaacggcgagatttatgggttcggcatagctagggagttcacagagactaacgatgaagtactcaatattcctgacccatcgaagctccgaggcaaggctggaaggaggaggactcgtcgcatccgcaacgatatggacgagtcggaggctggcagggtgaagcgttgcagcaaatgcgatgaacgtgggcacacctacaagcattgtcctaaagacaaggagaaaccaagtgcggcggaggcaggactatcaggatcagcagcagatggagctcgccctacgggtgaaggcactacctccactcgaccacgtcctaggcgtcgtcgtgccacgtctggctacgtggtgtagttcttatgttctatgttggcatgtgggtttgcttgtaatatgtttcgaacttatcgatgtgtttatgtttcgtcgtgtaatgtcagacttcggcatatcatgtctttaggtctcgtgatgtaacgtcagactaaggcccctagtgtctttagatatgctgatgtatgtcggacttcgacacgtaatgttatgttatgttatattatcgaactctacataaatgttaaattgcacgtcatcgttatgtaccattagtaacgtttgctttatttaaatagcctgtaatcttgttgtacataattattctcatgattttattactatttcataattttgtgagtcatattttgttttacattactacgttttgaattgttataacacgaaacactatatttttcagagatggcacgtcaggatacacctcagctgttggacccggtgatagatcaccgacaccggtctcaccttactgcggtgcagggggctcagcttgggacgttccgggcacggacgtgcggtgagctactcacggttgacgactcctttgtcgagaggtacgaacagtgtattactataaattagttgcgctgtaatattttttataatgacatattaatttcttattgtaggctgcgtgaggccagcctcctaccgatgtgtcggctggtggaggctgccgccggccacgcggacccggccagacgatggactgtggacaggtccctcctagcagctttggtcgaccgatggagaccagagacgcacacttttcacttgccgtgcggtgaggtagcccctaccctacaggacgtatcgtacttgttggggctaccgctcgcgggagacgctgttgggccagtgaccacggctgtggattggcaggacgatctgacggcacgtttcgcactagtacagcgcgcaccgcacctcccgctcgagccgttggcacaccaccgcaacaccggacctacgaagaggtggctgcttcagttcaccgtgagtgtttttgtaccgaaatgacaagcgtactacatatttattccacatgttaaggttcctaacattttaacgaacgcttgcaggtcgatcagctacaggcggaggctgacgagtactcctacagccgctgtttgaaggcgtacttgctctggcttttcggctgggtgatgttctgtggcggtcacgggcacgcggtcgacaagggactcgtgcactacgccaggagcatcgccgacgccgcggtaggcgaggtgcctcagtggagctggggttccgcgttgttggcggctctgtaccgtggactttgtgaggcttgcacgacgacggatcccagcgcgacctttggtgggtgccctctctttctttctatctgggcagctgagaggattgcgatcggccgcccggaggtggaccagcacgcgtacgaggagtcactgtacaaggagcgaccagaggtcgactaccctacgatgggtactctgtggtgccgtcgtcaggtacgttgcatcgatcttctcgtattgttaagttaattgctcagttcattatatatcaaatcgatcgtcccgtattgcagcgccgatgggctcacgtccaggttaggcggtcgtatcctgagtttgttatggagttcgaccgccttctgccgactgacgtcgtgtgggagccctacagtgccgcggctacccaggctcgtgcgccgttgggtctgtccacactctgcaccagggaccaggcgtactggatgactacggttccgatggtcttcgacatctgcgttgagcctcacgcccctttccgcgtgatgcggcagttcggcttccgtcagccctttccagtaccttttccgacgaccgtcccagctgctgttcagcggtaagatctttcactacgctttccgttattgcattaaaatctacctgttcacaataatttgtaacatctctcgattcacactaatattacacattaattcgcaggtactcgcgcaagggtcagcagtcagctggcgactggcccgccaagttggcgacttttgttgaggactggttgctcgcaaccgaggaggtcgtggaccacgagggagagccgcacactgaggaggcgtacaggcctacctacgctggtaccagccacgcacccgtactagggtcaccttcgctcccttggaggagcagccccacgttgcgagcactagagacctctacgccaggcaccgcgaccaggacttcgctcgttgtgtgagtaccctgcatcgcaccattcctttatgttttcgtgtctttctcattgtcaaattttacgaatatgtatgaataaattaaccatgcaggctcacgacatcaaccgggtcgtcgttgacggttcaacgacgatccaacgtttaggcgcggggattccggtacccgtagaggagcacttgacgacgtacacgcggatggtggagtcgatgcgctcaattctccgagtgctcacctgtcgtgcagacgacgttgctcgggcagacgcagctgtacagcggccacccgtaccgactggtccccgtccagctgcgcacgttcctaggccaactccccctccgcacggaggtaagtatttttaaggatttttctgtacatgcctcgcacatatatgtgagccgtttcacttgccgattgattcagggtttcgtgcaccgttcagcaccccgccttcctcggctaggccttctggtgtgccccccacaggtacttaaaaaacaacattacttcgacaataaatttacatgcatttaatgtcttagcttacaaggtcccattgtcgatgtgtaggtttcgcccagttcgctatgatgcaggacttctcccaggctacagggtcagcgtctcaggcagctgtgtcgacctcgcactcagcgcagttctgccagtacaccggtacttcgtcacaggcagccggcacgtcgagtcagggtccaccactggaccatgctgggacctcgtcggatcgcttgctgccttccaccgtgctcttcgacatcactgacttcgactccgcttcaggctcggcagaggacgtcatcggcccctcacagctgggaggcgcaccgccggtgtagacgcaggaccaggcgcaggccactcctccgccagacactcgtgctacctgtgctgtgccaccggatcgtttcacctactcccaggaccacgtgcgagcacaggcccggaggaccaagcgtggtcgcggcgcggggcagggccagtagagcagtcttctctttgtttatttgcttcactttccagtactgtatgcttgtgtaatgactacgttgttgttatatgtgcacgatatctttcggcgcatgcacgatacctttcggcgcatgcacgactactttctgccgcaccgatgcagcctcctttattcgcgtgcgatacgagtatttgcccgccatttgccgcatacgaccaatgtaactttcggcgccgatcaggcatgcaacttcggcgtacccaccatgccccaccacgttcacatgtcaaggatatcactcgattttttgcgcctatataagtcgccttaacgagtgaggcctcacgaactcagtcacattcagtactctcttccctacttgcttcattacaaatcctaccggctttcgtcaatggctagacgccggagtgttgaggatccaaactggcgcagcgatccttatgtatacctactaccaccttggtgccagcgtcctctctgcctatgcggtgatcgatgccaactaatggcttcgaggaatcctgatattcgaggaaggcgcttttttaggtgccctaactatgaccgtgaggtattttattatctgcatatgcttattcattccgtatgggtaatcgctttattcttcgtaacactactctattcggcagacccgcactatggcttgcacatacatcgagtgggtcgatacagaaaatcccgttctcgacctaaccacttgtttacaagaaggtcgctggtatttcgcatccgaaagtaccgagcaatacttacagagaaaagcggtttatgaacgacaatatcgtgaacaacagagcgactggcgggtgctaactacggcactccctccatgggaagcccgtccaagatgcaggtgtggtgatcgttgtcaggttcttcgttctataaatcctacaacattgggtcgaaggttctttgtttgtccaaatattcttgacgacgatttcatggtaagaatattttgattacatgaatccttattttctcacaacatttactaactttgctcgctttacatctattctttcctcccaggaaccaccaaggagatgtcaatacagagaatggatagacaccagaagggttctaactccacctagccgtgttgtgcagcttgaactaccagagcaatacagggttactaaagcgcggtttgagagaggagagggatcctcacgtaggggttagctattatcggacaacttggcatattgaaatttctactgtcatgcttccttgtcccattactacatcgtcgttgtgttcaactattgcactacctccctcctagttcgaatctaatatcatctatgtaaccgcaatggaaatagttgtatcatgttcaaattgtactactatttcttcatcttacataattctccttgtttaagttcatataatgtttctacgaccgagactgcgataggcctatattaattatccgagtactaatacgtcgaataaggtacaaaataatacctcacttaacatatgaaattgcgcaacaaccaacttcaatacatttttataacaatattaacaagttttaccaacaaatacttctttatttattattaacattacatagaaaaatcttttgaccgtactttttacatctgggtcccttgccgccctctattggccgcaaaaagtacggccgcaagctctgagggggcgtccaaaattgcaattagccccttgccgccctctgtatgggcggcaagggtctaatcgcaattttggccgacggcggcagacggcgcggtcgacccaccgtctgccatgttagcttgccgccccaatggtgggcggcagggtctatttttgcaattttgttcgccgatagattatttctgtaaatattaaaaaaaaatctaaaaacgaaaaaaattcacagagatggcgccgggggccctctccaatgggctgtggcttgcctgggccggatgcgcgcaaacaaatcagcccatgtgtgtgtttggggtggtggcccggctcttgggcttctcctctctactccacgcgttgcaagcgtcgacgccgatgccatccgccgtcacggtctgcacaagcatgcatctgctcaggcgcctcgcgctccctctggcgggatgatacgcttttggatcattggatggcagcgggtttgttcgagggataggtttttgcttctctcgaggctcgacggataagttttagtagctgattggtggtgttggcgtgggtcgttcagtgatgggttcacgtctaggcttagcgctctctgatcttgcttagcggcggttggtgcggtgttaattttgttttatcacctgccattaaggactcctgatgctgtaccaataattgcagagcaattgccatcgtaggagcaggattgcaagagacgactgacttgcagcctttcttgactgctttactttgtttgcattttattagtttatttaaaaggcctgatcacggattagtggttagtatgtaaaaattcatctgtatctagtgagcagccatcaccgatggggtcatctttgtcggatctaaatactccatccatctacttttgatagtcatattttatcttggcacacatatcaaggataagtaattctacttatcatccatttaaatatgttactagtcattcctcgtaaacaagcgattaattaatatttacatttctcaattcccatgtagctaatcatgtgtggaagaatgaagagtcattcattaaatccaagaaagtcgttaagataataagttgttggattgaaatatgcctatcaaaaataaaattttcagatttggaaatatgactatcaaaagtagatggagggagtaaaaacctattactgataaggtttgactcagcgcgtgaggcatcctataacccatgatgggctccaactcttactcgtcaaaggtgactttgtcatccgactaagtcttgctctccatacttgatccaacatgtgttctccttcatgaattctggacatattagatgagggtgtatatctactcttccgacaaacatcttctcattttttttcaatctacacatgaacaagtcatataatcgttgttccttctttctctcctcctccgcaacgtttataaaatttgcaacaccatttctatactcttttctatgtcgatcaattatgtacatccaatttccgtccatctctacaaatgcgaacaaatattatatatgtgtgtgtgagagagagatttatattataaaatttgtagagatggtttatttattattacatatagagaaattttccaaattttcttttttttcttagaaaagacaaaatttgtccctctagtcctcccaccacaaatgtgaaataatacatttgattgggataatcattacatgaaggtgttggagtatttatagtgtggaatatcggtaacgaggcgataaatgaaacccatcaataaccaccttattggtgacgggctttatagctatctttgttgggcctgtagatctggttgcgatccgtcaccgatgatcttcggcgggccgcaacctaacctcgtcaccgatgagggtcatcgctgacaggtccagccatgaggtctcaggtgagtgtttctatgggtgcttctatgtcggagattattttgggccgttaaaagtgagtgcctatgcgattggtcgtaggtctccgttatagatggtccatttgcgatgtctagttctatattagtcgtcgtttgatgaaacatctgtaggatcgaatactaagaaataagccaaccagagggggggtgaatggttgatgtacccaaaaactaaaacttttagcggaattaaaagttaccctcgaatcgacggatcacggtgtgaccgaagtagattggccggtctgaccgcctggatatcgtcggtctgaccggagttgatcgttcggtctaaccgccccgaagaagctgtagtcacctgaagctgccgccagtctgaccgccgcaatgctgccgatctaaccgacggtatctcgccggttagaccaccgaacccgagcaaacacaaatcgaagaatttttgatgtagacgacaactttattacttctctctgtgtttacaaagtgcaacaacagcactcctcatgaaaatctcgactaaactcgaaaccttaactattctctcaactcaatgctctctaaagtgataccgggaggccacaccctccctctctatttatacataaggtaaggcagcctaaagccacgaaccaaactcatacaagaaatccaaatccacctagaaaaccttcccgtacaagaaaccaactttacaaactccaattgtaccaaatttggactccttccaatttcgactccgcatcccatacgcacacaatatctccatcgtatgccatatggaatcttcaccaaccacgtacattgatctttagcctaagtatcccgcatgatatctgactgtccggacgtcaccttatctccaagttgactcccaatccatcaccggcaatactctcccgagacatcaagacacctacacatgaatcaaacaaagaaaccatattccgagaccaagttatctccaacttgactcaatgttagcaaacaacagtattacgtacgcatagtatccatctagaaaccataaacatgaaacattcacggatatccaatgaaacaacccgaaaccgaaaccgacatagtgtcggccggtctgaccgcttgatatatgctggtctaaccggcaaccactgcccggtttaaccggacccgacaatacaacggttcttgttcatcacctgaaaatccaatcatctcaaaaaccacttcgccaataatctccaaatatcaaaactaataatctcagatgctaattgttcacagaataagaattaaatacactttgattttacaaccttgaccaaataccgtggacagctttttccttagcaaaattttactcacccatttcacacagtttagtttgctatgcaactctagggcttaatccttacctatgatattttgggatagcctattacatatggtggtgccaatggcggcgtgtaggtgtacgttttggcatcggcgtgcaaacttattcctaccatagccattttttttccctactagcaagattttattcatccatttatacagttttgccatgaaattgttgggattgattaatcgcaaattggatattttgggatatatctatagcagagcacaggataaaagagtatcaaagctgttctacacgataagatataaatgaactccctcttccacaataatcactggaacagtaccgcttaccaaatgggatgactaaaagtcgtcgttgatcacttcagcgcagaatatttcaggtcatttgtagtctcatagcatatagttttatcaataagttttacaaaattatagccggagaacacgcatgccattttcattcataattaaaccatctttctgctactaacttgtgttaagaattctaattttagccatgaacctcgttgatgcaaatgtttgaacctgtttagtcaaaacagaacaattctttcatgtcgctaacaggtactgttgaaatttgtgtgtgctgtttggactgaagttgaaatttccacccttgtgttcagaattgaaccatcttgtgttcaaattctgaattttaccaatgaaccgcattgatcaaatgtttgaatcggtttggtcaaaacataaattctttgatgggactaattattggtagtgatgaaatttgtgtaaacggaccaaaggtgaaacttctggccctatatctcgactaaggaggatcttagtatcaatgttttcaagaaaggagatggtgagcacctgggtgtattcgaacccaggccgttgattgactagctcccggcagctccctgccaactaagctacacaacgttctcatgtttttcatccagacgttaaatcatgattcacaagtgctttcattgatttctttgcatttatacagaagtggtgcaagggaatgtagttgaagaaggtgactagaatacttatctgcaacctttttgtgttgtttctctgaaactttttcttcatgaagctatactaacggtagcaagtgagtttccattaagatgtgattttttttatcgtgtgtgtcctattataatcgagaaattttacaatccttgagacgttctaaaaggtatcaaaatttttagtacaaatttggtaccttctagtaccaaaggtatcgaaagatgctaaattttacactataatggtaccttctggtaccttttgaaggactaatcgttataatcaagatatggagctgaaataggatactatagtcaatttacttttataacttattctagtactccctccgtattttaatgtatgacgccgttgactttttaaccgacattttgaccactcgtcttattaaaatacggagggagtaagtattaatatagttattgctgattattcttgcttatttatttagaaaacacttccaccttattgttacctataagtgcctatataacatggacaattttcctacccaaattttcactcgtccatttcacacagttttgctatgaaattgttgggcttaatgagctcacattggaaatttgggatagcacggttactattatgcacctgcaccagtagatgcagatgatctgtcactacagggacagtgacgttgcccccatttgtgacgactggcaaatcgtcgatcgtttcagcgcagagtagtcttaggaaatcacatccatcaatagcgttgtcaatccttcgatgaaacgatcgttgtcatttaaccggaatcatttatatcgcagtagaagcaggcccgggcgccgggctaccagaacaagtataattccttgtgtactcatccagctttcaatactacataaaacattattgaaagtctgaaacacaagtataataagaccttgtttagatccaaaaaattttggtcaaaaacatcatatcaaatctttaaacacatgtataggacattaaatatgaaaaaaaacccattgcacagtttgcgtgtaaattgcgaggcgaatcttttgagtctaattacgccatgatttggcaatgtggtgctacagtaaatatttgctaatgacggattaattaggcttaataaatttgtctcgcagtttacaggaggaatctataatttgttttgttattagtctacgttttatacttcaaatgtgcgtctatatatttcaaaaactttacacccaaagaactaaacacaccctaagtttggcccgaggtggatacgggacgcttgtatagtgatggtgtttctctttgcaattcaattttgcgtggctcatacacattgtttagatggtaatcagatcgagagatgctagtccaactcaattatttgtggagtgaataagatggcaaaaaacattgacttgttcaggagcaacccttgcgtacacacctgactgcttgtctgaatgcaaattcaaagtaattgtgtaggggcctacctgttgcagattcaagtgtcgttgcgcttataaaagcttacaacattcactccctctcactaaactgtggcatgttctctagccgcttgtgatactcgcaatcctaaaccacgagagaaaacattgcccctatagcagaagggtagatcgatggaggcagccatcggcgcagcgagctggctcgtcgacaaggtggtgacacagctgtccgacgagctggtggcggcttacatagccagcaccgagctcggcctcaacatggagcagatcaagagggacctcatgtttatgcaagggctgctccatcatgcccgggagaggagggacaagagcaaccctggcctgcaagggcttctagaggaactcagaaagaaggctgatgaggctgaggacgtgctggacgagctccagtacttcatcatccaggaccagatcgacggcacccatgaggccacccccgtggtagacgatggcatccgtggccaagtcctccatggccgccatgctcttcgtcacaccatcggtaactgcctttcatgcttttcttcttcttcttcttcttctgtaccagaggatgccaattatccacatcacacagccaagtcccgtagtgatgaatctgactatgttggcaagttgacattcaatcgagtagacatgtccaaaaaaatcaagtcggtaatcgagggcatatatgacttatgtagccatgtatccaatttgctcaaaattacccaacctgaagaaagaagggttctatcactgaagcgacctcccaccagctcaacaattacacagaataaattatatgggcgggaagacatctttaaccagactcttgatgacatgtgcaccatacgtagtgaaacactatcagttcttcccatagttggccctggtggaatcggaaagacaacctttgcccaacacctgtacaatcacaaaagaacagaggcacacttctctggcaacaagacctgggtttgtgtatctactaattttgatgtggttaggctcacccaagaaatcttgatgtgcatatgtcaaaatagaaatgaggaaagtagcggagcacatgaaacatccaacttggatcagctccaaaaatccattgcagaaaaattggattctaaaagatttttacttgtcttggatgatatgtggagatgcagcagtgagggtgaatgggaaagcctactagctccattgaaaacaggagaagccaaaggaagtatggttattgtcaccactcgttttccatctatagcacaaatggtaaaaacaaccaagccaatagaactgcaaggtctagaggatgatgaattcttcacattctttgaagaatgtatatttggtcaggaaaaacctgcgtgttatgaagatgaattgattgatattgcaagaaaaatttccaagaaatttaagggtttcccactagcagccaaaaccgttggtcgattattgaagaataacctttcccaggaaagttggatggaagttcatgaaagaaatgagtggaaaaatcagcaagatggtgatggcataatgccagcactacaaataagctatgactacctacctttccatctgaaaaagtgtttttcttattgttccctttaccctgaggactaccggtttggtaatttagagattacttatttttgggaagcattaggcatcatagcttatggagatcaaaataataaagctgaccatgtaggattaaagtatttgaacgaactagtaggtaatggttttctcatgaaggaaggtgatgatagtaggccatattatgtaatgcacgacttattacatgatctagcacgaaatatttcgtcacaagagtgcattgacataagttcatataactttaggtctgatagcatcccacaatctattcgacatgtatctatcaccttacaatatgatgagtatgaccaaagttttgagagagaattagaaaaattcaagacaaaaatagacatagtaaatttgcggactttgatgctttttggaaaaggcaatgcaaacatgacctttttcaaagatttgttaaaagaaacaagaagtcttcgtgttctatttatgcatgcaaactcgcccgaatctttcccacatgactttttcaaactaatccaccttcggtatctaaagttgaaaataccttatggcgtagaactatctctaccaaatgcaataagtagatttcatcacttaaattttttggatctagggaatagtatatgtattttgccaaaagacatgaatcgtctattcaatttacacctctttcttgctagaaaagaactttgttccaatattcctgggattggtaaaatgaagtatttacagaggttggaagagtaccatgttaagaaagaagacattgggtttgatctgagtgagctaggggatttgacagagcttggaggtgaactgacaatatttaatcttgagaatgtggcaacaacggaagaaggtaatcaagccaaattgcagttgaaaagaaatttgagaagattgacgctaatttggggtgcggtgcaacagacgacaggatctgatgttcttgatggcctgcaaccacattataatcttagagcacttggcataataaaccatggtggtcccactggtcctggttggttgtgttccgatatctatctatctattatatactaaaagtccattaaactttctataaacgctctcaagccgccacgtggctttctacaaacgctcctaggtcaccacgtggcattctataatctcaccgtcgattttcttttaaatcggtggacccactaattttaactattagatcttcattgaaaaaataaatctggtgtccccactattttttaaaaaaattgccgtgtttgccatcgggcaaggaacgtaagttcttttttttttcccggcggcatacgatacgtactccacgttccacgttagtattatttttttccttttttttattttgcaaacagttctggtgtccccactatttttaaaaaaaattgccgtgtttgccatcgggcaaggaacgtaagttcttttttttcccggcggcatacgatacgtactccacgttccacgttagtattatttttttccttttttttattttgcaaacagtactttttctttacaccttctgaaaacagtactactactacgcacatcgtacatacactaggggagtttaggagaaagtgttaatagatatgtaaaatcacatcttatcgatttaagtaaaaatccatagttaaatattttttctttttcttataatttttaataattcttttaatttagagatatgacatgtggtaacctaccagcttttatatgagtgtcacgtggtagcttaatagcgtttctaaaaagtttaatggacttatatatagtaaaagttaatttaacttcctataaatactctcaagccgccacatggccttctacaaacgttcctaaatcaccacgtggcattttttaatcacaccgtcaattttacgaaggtaaaaaaaaaaaaacgcagtacgtactccttccaccctccgaatctcccatcctctcctattttctagctaacttatcatattttctcattaacactcaatatatcaaaaaataattcggacatctaattgatcgcgactctcaaattataattttatactcaggtttttttcaattgttatgttatttataattaaatataaaattcaaaatccatatcactcatattttgttatctaaaaattagatcatgctgccgttctaactacaaatgtcagggcctaatggtacgcccataaacacttctaagtcgatctcgccttgtaacactataataaattaaaataaatctataagtatgacaaatgaaaataaaacatctaaccattgctctccacttaaatcgatggatccactatcttatatggttagatctatctttaaaaaaaaatcccaaaactccctcacattcctccattcctctgattcctctctccctaccattccttctctgttctttttatctccatagtaactaaaaccaacattatctttaggataaaaaaactccaaaaatggactccacctaacaagtctagctagctttccctctataatgtgcttttcttatctttctcctcaagctagcacttacagaaacaatataaactagactttaaaacactcataaaattttaaatcgtatattcatttatgatatttctacactattttaatttttaattaaataaataatttaatatctgtattgacttacattgtggaccacatctatccacctttaagcctccaataaataaaatagaacactaaaatttctcattaaaaattaaaatatctcaccttatgtttttaataaatggtcaacccattatttataccatgctagacatctaatctccttcttccaactccttatgtttcagattataagtcattttaaattttgtcaatgtcaaattacttgaattagtttataaaaaacatagtaatattttctacacaaaacaatcatattataaaacatattcaattttgaattcaataaaaataatttggtgttgtaaatattgatatatttttcctcaacagtggaaatagttaatttctcttaacatgcatatatgggctatttacttatatttgaacttaattagatgcacttttatgaataaatgatctttttagggataaataaacgttcctaagatgatcataatatctaaattatacatatgatatctgatgtcactaatagattagagaaaaagcttataattatatcattttttcgtgtcataacgtgtaccccgtctaggatctatttgtcatacacagcacattgaaaatatttaagggatacctttatcccatgccaagttgtatggccattccaaattgcagagatcaaaacatttaagagacgctcgatggaatggaaatctataaaaaaataacatgataaaaataattgaagactgaactttttttttctaaatttaacatttttttaaaaaaattgaaacccattctaaatagcaatgttttaatattttaggagtactgaaataatgaaaataactaaatatttaaataaaatataatagaaaatttgacccttttcagcattatgttggaaacaaaatctaatataactaaactacaacttgggagcgataaaagtctcattttctaatatattttctggttgagaaaaacatttactgctaaactgtagtttcatactgcaatactatatacatacaattaaatcaatatttcaacaaattcagctaatttaattagatgtagtcgtattaggcatatttttaatagaaaatatcttcaattaatatatcctaaaattcataaagacatatatattataaaaagaaaaattgttactcagagtttagaaagtacaaaattatgttatgctaaatattttaaaaaaagaaacgcattatgtacaaatgatatatagtttcatgtatattttttttataaaacctaaactgcattgttttaagtaattttagtttacaatttatacggtggcgatggttactagcattaagagaaacaccacacaaattattgaaaaattaaagatgtttacgatagactaatcataaatatttctaatcaaatttttaacacacttaaatatgatgcccgcgcatttgcgcgggctaccttcctagttcgtataaatggcctgaaatgtctacatttagagggcatatcttggagaacactcccacctttggggcaactaatgcatttggaggaacttactttgatcaatattgctgggatgcgtcaatttggacctgattttggtggtgttacgaagaagagtttcttacacttgaagaaaattgaacttgttggtttaccggaacttgtggagtgggttgggggagatcattgccatatgttttcaaagcttttaagcatcagatgtgaagattgtcctaatctcaccgtgctcctgctgccatcgtttgagtgctctatctctgacacaaaagacataaacaccatatggtttcccaacttgtgttctcttaagattcgaaattgccccaggttgtcactgcctcccctgcctcacacttccatgctaacctgtgttactgtgaaagaagatgatacagatttgatgtattttgatggaaaaagtctgaggttaaatcgctacggtagtgctttggccttccataacctgaacaaagtagaagatatggaaattgtagacatgccgctcgtttcatggactggtctccaaaagctgaactcccccagaagcatgcaatcgatgggtctgctctcaaacctctcatctctcactcatctagaactagtaaattgtgataacttaagagtcgatggttttgatcctctcaccacatgcaacctcaaggaaatggcagtttacaatagtaaaaaccatcacccctccatagcagcggatttgttctcagtggtggcaatgatggaagtaatacctgcaggttccttccagcagctggaacaactctcggtggacagcatctcagcagtgcttgttgcccccatttgcaacctcctggctagcaccctctgtaagatggaattcccgtatgacatgtggatggaaagcttcaccgaaacgcaggaggaggcgcttcagctcctcacctccctccaatgcctaggattctatgtgtgtccccgtctgcagtccctcccagaagggttacatcgcctttcttcacttcgtgaactaattatccataaatgtcctgaaatcagagcgcttcccaaggaagggttccccgcatcactgagatatgtatttgcatacgagggcatcagtgttgatctaaaggatcaactcaagaaactaaaagcatcaacgccaggtttacgtggtaaagcatgtcctctcctaattcctgtatttgtcccttattaaatctgtaaattttcatatttaactaatttttgcctgttttgctattaatgatttacctcatgtggagtagtggtttcatcgctaaccaacttagtaaattaatgcgagctacacaagattacatgaaggccagcaatctagaggtcagttcatggaaaaccaaggcagtccttcattttgtggtttctttctaagttcaggcagctgcttttagtttagtccatatggttgagctgttttctttatctgctatctgaatcaatgctatattagttagcttacattctatatatccttacatatttttttcatctcaaacagcatcacaacagtttgcacgcatgcagctgcgtaataaatctgaaacccgcccgccctgctatggtctgatgtcatcagatccaacagcatcaattaagccatggtggtcagtagcatcacttctgctcatatcgtttgtttttttttcttttctgtagtttctcctgaaactagtactccatccattctaaaatggcaaaatatatcaatatcaacgtagtactacgaatgtagacagccttcatcgtattaggtggtgtctaatctattattaggacactatattttgaaacggaggggatagcttttgtaatttctctcgatgtcctgaaatcagatcgctgctcaaggagcattcctctcttcattgagatatccaagggcaagaccgcaagaggatgcagcatcgtctacaggatcaactcaagaaaatagctaggagaattagacccacatttggtaaaagtgccagggtgatccaaagtgaaatttaggtaataaaaagtgacctaaagtgcaattcactcaataactttacaacgcactgcagaagctgatatgttctctgttatctttggtagcggtggaggcagcctaggaaaatctggctatactgagatgtttgtcatttaaaaagagaagtctatcttcaattaaaataacaccaaaatgcctttatgcattcatcaacgagccagggaagcatttcaaggtactagattcaacaattcctgtaggacaaatggtcattccactgttcatgggtattgagagtatagatagccatgtgggccgcccggcacagcccggcccaggcccggccgtgcctaggccgaggcttgtcaggccggcacggcccgaccgactcaccgggccagcccacgtgccgcactcacggcctaggcacggcccaacacgcctcgggctgtgccgggctggcccgaaggcacgatgggccatcgtacgtttcctcagaataagtctaactttcctccctcctattgggctgtgacatatatatagctaaaaaagtctattttacctccctcttatttgggctgtggtatataaatagctaaaacaaactcaacgcacccattggtgcgcggactaatgtatggcccgtcaccatcgtgagcttctctatatctcaatattttttttcatatttatttgaaattgcctgcgttagttcgtttgggttgggaacccatcttctccacatagaaaacataacggtccattagcacgtgattaattaagtattagcaaaaaaaaactttcaaaaatggatcaatatgattttttaagtaactttcgtatagaaactttttgcaaaaaacgcaccgtttagtagattgaaaagcgtgcacgcggaacacgagggagagaggttgggaacacagagtaaagaagtgcgttttttgcaaaaactttctatacaaaagttgctttaaaaatcaaattaatccattttaaaaaaattttctgctaatacttaattaatcacgcgctaatggaccgctccgtttcctgtgtggaggagatggttcccaactcgaaggagcgaacagagggttgggaaccactcccctttgcacgcaaaacggagtgatggattaacgcatgattaattaagtattagctataaaaaacttgaaaaatggattaatatgatttttgaaagcaacttttctatagaaacttttttccaaaaacacgcgccgtttagtagtttgaaaagcgtgcgcgcgaaaaacgagggtgatgcgttgggacataggggaaagaactaagacagggggtgtttagataattagatctaagggtgtaaagttttggcgtgtcacatcgggtattatacagggtgtcgcatggggtgtttgggcactaataaaaactaattacaaaatccgccagtaaaccgcgagacgaatttattaagcctaattaatccgtcattatcaaatgtttactgtagcaccacattgttaaatcatggagaaattaggcttaaaagattcgtctcacaaatttatcgcaatatgtgcaattagttatctttttagcctatatttaatacttcatgcagatatttaaatgttcgagttcgacttgacagggtgtaaaattttggggtgggatctaaacagggccttagttttatgccagtaaaatttgtaacaaaaaattcacacatttgaaatgatcccttcaatacttccctcatcacttacaattttaataatttttttaaagttatgctgaatacctaaaatagatattattgtatattggcttacaaatttatatctaaaggaaaaaatgtagcaagtgaagaaattcaaccacctttttcagtcctttgtcagttcaaaattaccttcagaacccaaccaggacgtacctatgtatttgactccaacctgtctgataactaaaaaaaaaatgtcctagactccatgatgtaaaatttgctaggttaaattagaccagattttattttaagaattgcatgtaacattttctttttttaaattattcttaccttaatttttcctatctaatatttaatctgcattaattttgcttgtaaaattttcttgatggctaacattagttttttgttcttttgcctgtcattctcctcttacatgcagcgcaggacttgcccgtccagtagggcacccaagacccagcacgcgcgcccaacgtcattcgtccggtcgtcgcacgtcctttgcagccgctaattttcctccctcctattgggctgtgacatatatatatatctaaaagtctattttacctccctcttcttgggctgtggtatataaatagctaaaataagtctatttaaggtccctattctttggacaattacatttatatgtctattttagtccctatactttatgtgccgggcctagcctgccggcccatcgtgccgggccggccggtcgggccagcgtgccggtggggaggcccagacacggcccggcagtcgggccatgccgtgccgtgcttgggccgggccaaaaagccgtgccatgggccgggccttcgggcctcgggccttatggccatctataattgagagcgattttttttttctgtggaaatctaccaatccagaagcttatccacaaatcatcaatttaacatgcatcatatatggttcggcaccattcagattcgccagtggaaactgattctatgtacgcctactaacttcaaaatcttcttattttcataggcaacctgtccagctgttttcgataacagaggtacatggcgatgtggttatgtttgtagctttcttgggagttctgaacaaaccatttgtaacacattagcaggtgattacatggcttgttttcccacagaaattacagttttgttgttaaggggcaatacccgaattcttggaggatcattgtttccatttcatttcgttcaaaagaaatttgtttccatttcatcatctggtagactggtatgttcatagtgttagttagcatgaaaggttcggatcatgtgatcacgacctgacagcttgcatgcatgtagttgttgaggttagtttggattaggttagtctatccatgcggatcaggttagcctttcctccacatgcgataacagatgtttgttagagtttgttttctgttttctgttactgcatgcagtcgtttcatcaatctcggcttcggttgttctcagctgcgccgaactctgtatcgccacgatgggggctgttcccatcacatatatattaacacgaaggcgacgcacaggattagtgcgatcgtttccacccaaactaattcacatggtatcagagcgttgatcaattccctaatagatcaatactcatggcctcgtcgtccagtacggctgccacaaatccgttccaaggccacccaatctcagagaagcttgggaaggcaaatcatgcgctctggagaaaattgacatttagccattgtcaaaacggggtttcgctggaatgccactcccaaaaatggtttcgttaaaatgccaccctcaaacaggggcaacttgttgcaatgccattccatccatttcttctcagtttaatgttttttgtaatgtttttcttgttgagatgaccaaaatacccttatcctatctcatctctcctctctgtcttcctcctctccgttcggctcggcggcgcagctagagacggagacggcggcagcgtggccggagacggggaaggcggcagcgcgcttggggatggggaaggcggcggtgcggacggggacggtggcgacgcggatggggacgggaaggcggcgacatggctggggatggggacggcggcgactgggacggggacggggacggcggcggcgccgacatggctggggcaggtgggatgttcttttacgccgatgcagatggcgccgctgagccgagcagccttccccaacccacgtcggcgccgtccccgtcgccagccgcaccggcaccgcccacctcatcgccgaccccatctccatcctcctcgacgacctcctcctcgagtgcctcgccggcgtcccctatgcctccctcccgcaactccccaccacttcaccacgcttgtcgcctccgtcgcgcgcacggcgagctccgctcctctctcctcgccctctccgtcacgcccacggcgagccgacggatgttggcgtggtggtggtgatgaggacgaggagccggcggccaccgactcgcagctacgccccgtcgccgccgctacgctccaccgccggcgactggatggggatcccctttcttctttcccctgcaaagtcaacaaaatgactaggggcaaatatgccagagaatgatggaaaacatttggaaatcagttaaaatggttgaaatggcattatagtaagttggcttcatttgacaatggtattataacgaagccatattcggaagtggcattccagcgaaaccccatcctgaagatggctaaatgtcaattttctctgcgctctggaaggtgcaagtaagcgccgcagtcagaggagcgcggcttcaggggcatctcaccggcgcaaccaagcggccgccggcagagatcgctgtcacaaaagatggcgccaccaagaaggagccgaacccagcccatgaagactgggaagccaccgaccagcaagttctggggtaccttctctcgtcgctgacaagagaggtgctgatgcaggtcgctacaggcgacaccgcggctgaagtgtggagcgccatcgagcagatgtactccgcccacacacgagcaagagcgattaacactcggtttgctctcaccaatacaaagaaaggtaacatgtcaactcctgagtattttgcaaaaatgaaatccttaggagatgagatggctactgccggaggtcgcccgatcgatgaagaggagctgattcagtatatcatcaccggccttggcgagggctacagcgaggtggtgtcggctgtctgcgctcgggttgaaccaatctctgtgagtgatctgtactctcaagtgttgaactttgaagctcgccaagccatctaccgcggcgcacaggaggtcaccgtcaatgttgccaaccgtggaggcttcagccacggggggcgtggcaacagcaatggtggccaaggaggttcgcgcggcggcggcgacggcggcggccatggtcgcggcaacggaggaggtggccgtggtcgaggccgcacaccaggaggcgttgataaaagaccaatctgccaagtgtgtttcaaacgggggcacacggcagcagattgttggtataggtacgacgaggattacgttcctgacgccaagcatgttgcagctgcagcggttaactcctatggagttgacacaaattggtacatcgacactggtgctacagatcatgtcacgggagagctggacaagctcactatgaaggaaaaatacaacggtggtgaacaaatccacacagcaagtggtgcaggtatggatattagtcatattggtcatgctattgttcataatcccaatagtcgtaatatccaccttagaaatgttttatatgtgcctcaagctaagaaaaatcttgtttcagtacatcgcttagttaatgataactctgcctttcttgaattacatcgtgattatttctttcttaaggatcaaatcaccaggaaaactctccttaagggaagatcatggcgcaggctatatcctctaccacactcctccttgaagcaagcctacagtgccatcaaactatctttggaccggtggcatcatcgtcttggtcatccttccattaccacggttaaacaagtagtcaataagtttagcctcccctgttcagatttgtctagtgagtcagtttgtaatgcttgtcaacaagcaaagagtcatcaattaccttttcctatttcttccagtgtttccaaacaccccttagaacttgtcttttctgatgtttggggacctgctccagagtctgttgggagaaaaaaatattatgttagttttattgatgattttagtaaatttacttggatttatctcatacagcataagtctcaagtgtttgacaagtttcaggagtttcaagtcatggtagaacgtcaatttgatagaaaaattctagccatgcaaactgactggggaggcgaatatcaatcccttaactcttttttttctaagattggcattgttcatcatgtttcctgtcctcatactcaccaacagaatgggtcggctgagagaaaacatcgtcatatagttgagatcggtttatctctcctatctcatgcatccatgccattaaagttttgggatgaagcctttcaggcggcaacttatcttattaaccgtgtgcctagcagagttatccataatattagtccccttgaaaaactgttcaaacaaaaacccgattactcctccttgagaatttttggttgtgcctgttggcctaatcttcgcccctacaataaccacaaattacaatttcgctctaagcgttgtgtttttcttgggtttagcactatgcataaagggttcaagtgtcttgaggtctctacaggacgcatctatatttctcgcgatgttgtctttgatgagaatatttgtcccttcactgaacttcatgccaatgctggtgcccgtcttcgttctgagattgatattctcactcctgaactgctaggacccatacggtctgttgggaatgaacaatgcatgcatccagtgactaatccattatctgctgatgtttctgctgctttatctaatcgtgctaatgagccacatagagatggtgcagtacatcccgctgatgcagaagatccgccggcgacgcctcctctggatgccagttctggtccagaaccagaccgtgtcgtccaccactcccctgcggccacgtcatcaggccgtcatccgggtcccacacctggttctgtgccacggggggcagcatcatcgctagcagaggagacagcagaagactcagtgtcgcaggcggtgcaggagcaggagtcgcaggtggtgcaggagcaggagcagtcctcaccagcgcaggaacatgcacaggctgtcacagatgagactaatacattacagcatgcagatgtgactgacacaggttcagaggcaccggcaggaccgcgcaccaggttgcaaagtggagttcacaaagaaaaggtatatactgatggtactattaaatataagcattcttggtttactgcttcaggtgaacctacaaatgatttagaagccttaaaggataaaaattggaaactagcaatggattcagcgtatgatgctttagttaagaataaaacttggcatcttgttcctcctcagagagggagaaatattattggctgtaagtgggtgtataaaattaaaaggaaagctgatggtaccctagataggtataaggcaaggttagtagcaaaaggatttaaacagaggtatggtattgattatgaagatacctttagccctgttgttaaagctgccactatcagaataatattgtctttagcagtgtctaaaggttggagtcttagacagctagatgttcaaaatgcctttctgcatgggtacctagaagaagtttatatgctacagccaccaggttttgaggatcctactaagccacatcatgtgtgtaaacttgataaagctctgtatgagttaaaacaggcacctagagcctggttctctagactaagtaaaaagttgatggaccttggttttaaaggatcaaaagctgatacgtctctgttctttctgaataaaggtgatataactatgtttgttctggtatatgttgatgatatcattgtagccggctcttcagagagggccactgcagctttacttcaggatctaaaaggggaatttgcactcaaagatcttggtgagctgcattattttctcggaatagaggtaagcaaggttcagaatggcattgtactgaatcaagacaagtatgccaatgatttattgaagaaagtgggcatgatagattgtaaacctgctaatacacctctttcagtaagtgagaaactctctcttcatgaaggctcattgttagggcctgaagatgcaagtcactatcgcagtgttgttggtgctttgcaatatttgactcttactagacctgacatagctttctctgttaataaagtttgccaattcttgcatgctcccacaactgtacattggattgctgtgaaaaggattcttaggtacttaaagcaatgcactcggttaggacttgaaattcataagtcaggatctactttagttagtggcttctctgatgcagactgggcaggctgtttagatgacagaagatcaacaggaggatttgcaatatttctgggttcaaatctggtctcctggaatgctagaaaacaagccactgtgtctagatctagcacagagtcagaatacaaagctattgccaatgccactgcagaaataatgtgggtgcagactttacttgcagagttagagattaaaagtccaaaagctgctaaaatatggtgtgataatcttggagctaagtatttgtcagctaatccagtgtttcatgccagaacgaaacacatagaagttgactatcactttgtcagagaacgggtaagtcagaaacttctagaaattgattttgtttccactaatgatcaagttgcagatggattcactaaacctctgtcagtaagactcctggagaatttcaaaagcaatctgaacctggttaggtccggattgagagagggtgttagttagcatgaaaggttcggatcatgtgatcacgacctgacagcttgcatgcatgtagttgttgaggttagtttggattaggttagtctatccatgcggatcaggttagcctttcctccacatgcgataacagatgtttgttagagtttgttttctgttttctgttactgcatgcagtcgtttcatcaatctcggcttcggttgttctcagctgcgccgaactctgtatcgccacgatgggggctgttcccatcacatatatattaacacgaaggcgacgcacaggattagtgcgatcgtttccacccaaactaattcacacatagatctaagctaagcagttttaggtgagagcactatctattgtttatggtattggtaacatatgtacatgatcattaataagagaactagtaagagaactaggaaggtagcccgcgcatatgcgcgggcacttatttaatgttgcttaattttttattgttataaatgtttatatgtagattatattttcaaaatagatcttcactctatttaaaacatgttttagttattatctagttatgacatattacataaaaccatacagccttgaatttatgataatgacatgaatttataagaacaacatgtgtcacgataataaaacaataatagaataatggagttgtttcatatctatttgtactatatgtgatttttttacctaaataaagtgtttttttaattaccaccacggtaaaatctccaaaggaccatattgttggttatattttgataaatatctataattttgcgtctcgtgtttttcaacgcctattcttcataatcattcataatcacagaagacaccttgaccaattaatttggagaatgaatctattttcccaaacttatttataataactaattgattaaagtatacttctttgtcacatcaatagagtgcatgacatacattcatcgaattatgcctgatatgctggaattcctcaactataagaaaatatagagtgaacttcactgtgggctagtaatttttacccaagtttcattttggactaggggtggacaaatcttttcactttggaccaggtgattttacaaaaatttcaaactggactggccttcttctccatctctcttatggtttttttcttcatcgagatactgccatggattaaccggagcaagcacataactaggatttcttctctcggatccgttcctgagctcgaactcacgaaattaagtcactgggcagcttgttgctgcaactgtttcctgtgagatcacaatcatgtgattttttttcagctcacatgattttggtgggagaaaaagagcaaaaaaagaaaatcaaggtgctggttttttctttattgagatgctgccatggatcaacccaagcaatcacatgactagcattccttctctccgatccgttcctgagctcgaactcacaaaatcaagccatagggctgcttgctgctgcagctgtagcctgtaaactcacaatcaagtgattttttttttcagcccacatgattttggcgggagaaaaagagccaaaaagaaaatcaaggtgctaagtgatcaggatacattactggcgtgtttagttgtttgtgagctaaagaaatcaaggagtgagtggcagcacagtaggtcagaggcaaggaacaacaagaatggtccaatgtgcaatataaggtagcaaatcccggtccaaagtgaaaacatcaaacatagcctagtccaaagtgaaactttggcaataataagtggcctaaagtgcaattcactcgaaaatatatcgtgagtagtttattgcgtatgttacttgattgttcatttgttatcaaaactatttgacaaagagaaagacatacatatgggacaataaatctcatgatggactaaatggttgttttatagcaagatcactggcttgaaatatttttcataattattttttagatttatgtaatatttatgttgcccaattatcatatagttctgaaaattcaaaaaaaatgaaaatattaatctcaagaagtattctattaaatcatatctacttaaaaatacacaactaaattgtgttgttttcaattattttacatatgtagctttaaattagcattatatagtcatcaagtgttatttgacacctggaatatgatgtaaaattatttaaaataggaaaagcctagagccaagtcattatatagtttctcttgtagagaaactcatcacagctttagagccatccactccctggcagcttagagccaatcctaagcaaacactgaccttggcaggcagctccatcttggctggccggctgagatcaatcatcgatggaggtggccgttggtgcggcgagctggctcgtcggcaaggtggtgacgcagctgtccgatagcttggtggaggcctacgtggccagcaccgagcttggcctcaacatggagcagatcaagagcgatctcatgttcacgcaagggctgctccacgaggctcagatgaggagggacgtgagcaaccctggcctgcctgggcttttggagattctcagcaagaaggctgacgaggctgaggacacgctggatgagctccagtacttcatcatccaggaccaaattcatggcacccatgaggccaccccggtggtagacagcagcatacgtggccaggcactccatggccaccatgttcttcaccgtaccgttggtaactgcctttcatgcttttcttcttcttctacacgagatggtgccggtgaccatgttggcaagttgacattcaatcgagtagatatgtcaaagaaaatcaaatcaataatagaaggcatagatgccgcatgtaaccatgtatccaatttgctcaaaattatccatcctacagtaggaagggttctatcactgaagcgacctcccagcagctcaacaattacacagaatgaattatatgggcgggaagacatctttaaccagactcttgatgacatgtgcaccattcgtagtgaaacactatcagttcttcccatagttggccctggtggaatcggaaagactacctttgcccaacacctatacaaccacaaaaaaacagtggcgcacttctctaaaaacaaggcctgggtttgtgtgtctactaattttgatgtggttaggctcacccaggaaatcttgaggtggcatatgtcaaaatggaaatgagggaagtagtgaagcacataaaacatccaacttggatcagctccaaaaatccattgaagaaagactggatcctaaaagatttttacttgtcttggatgatatgtggaaatgcaacagtgaggctgaatggggaagtctactagctccattcaaaacaggagaagccaaaggaagtgtggttatcgtcacaactcgctttccatctatagcacaaatgataaaaacaaccaagccaatagaactgcaaggtctagaggatgatgaattcttgacattctttgaagaatgtatatttggtcaatacggcggtcggccttagagattggacaaaaggcatctgctcagaggctaaattgcaattccatatggcactcaatgtcatccaaagactcgacgtggcacaagagcacagagaactctcccccccccggaaacgcgactgagggcggctctcaagcggaaagtcctaggactcgcttctatagaaagggcaaggaaaaagcaagcctccagggtaactcacatccgtgaaggagatgcgaacacgaagttcttccacctcaaggttaatgcgcgaaggagaaggaatacaatccaaagattgaaaaaggacagtggttgggcggtgacgcacggtgaaaaggaatcgacgattcatgatcacttcgcaagcttcatggggaggccagggccgaggccaaacgagctaaactgggagacgttggacatcacaccgattgatctagccacgctgggggaacccttcactgaggaggaagtgcatagggcaattaaggaaatgccagccgacaaagcaccgggaccagacggcttcactggggccttcttcaaagtttgctgggaaatcatcaaggatgacattctgctagtcttcagctccatctataacctgagatgtgcgcacctgaatttgctcaactcagcaaacatcgtcctaatcccaaaaaaggatggggctgaaagcgtttcggactataggccaattagtctaattcatagcatcgccaagatcttcgctaagatgctagcgctgtggttaaggccccacatgcatgagttgatctcggtcaatcaaagcgctttcataaaggggagaagtattcatgacaactacctcttcgtaagaaacatgaccagaagataccaccgcctaagacgggcaatgttgctcttcaagttggatataacaaaagccttcgactctgtgcgatgggattacctcctagccttgctgcagcgcaagggcttctcgacaagatggatagactggctaggggctttactgtcgtcttcgacatcccaagtcctccttaatggctcgccagggcaacggatcaaacatggaagaggactacggcaaggggaccccctctcgccgcttctcttcatcttggcgattgatcctctacagcgtatcctttccaaggcaacagagctgggtgcaatttcaaaattacgaggaagaacaactcggctgcagatctcaatgtatgcggatgatgctgtgatcttcattaatcccacccggaacgatgttgcgactttcgcgaacatcctacatcgttttggcacagccacaggactcgtcaccaaccttcagaaatcccaggttgcggctataagatgcggcaatatagacctggaagaggtcctccaaggcgttccggcgaagcgggcaaatttcccactaaaatacttgggcctcccgcttgttctgggaaggctgcgaaaaacggacttgcaaccggtctttgacaaaatatcagggagagttgcaagttggagggggaaaaacatggcagtagccgggagaaccacgcttgtaaagtctgtgctttcagcgcagccaatttatctcctcactgccttgaaggtgacgaaggaatccctggagcagcttgacaagcagagacatcgcttcctttgggctggtacgggggatatcaccggggggaaatgcaaggtcaactgggcaaagacatgcttgccgaccagccaggggggccttggtgtcctaagcttggacaagttcacaagagctctgagattgcgatggttgtggaacgaatggagagatccaagcaagccttgggtgggtttggaaacgccttgtgatggtgtggatagggacctcttcgccgcctcaacaaagataactgtgggcgatgggaatacaacgcgcttctgggactccgcatggattaacggccaaagaccaaaagacctaatgccgttggtctatgagatctccaaaaataggaagaaatccctacggcaagggaaagaagacgactcctaggtgcatgacctgaccctcgatgcgggttcatctatcacaatcaaccttctcgatcagctagtccgcctgtgggaggcggtacggaatgtgcacttagacagcgaggagccggatcagattgtttggaaattcacaagcagcggccactatacagcttcctcggctaatcatgcccaatgtttgggggcgccaaacacaaacttcaactccctaatctggaaagtttgggcgccagggaaatgtaaatttcatgcctggctcatcattcaaaatagagtctggacgtcggaccgactcgcgacaaggggttggcggaataacggacattgccccctatgtcgttgtgacaccgagacagccttgcacctcgtcgccatgtgtagatacacgaagagaatctggcgcctcgttgctacatgggtgggatatcagcagttggaaccggcccaatgggaggaagcctggtcagtccatcagtggtgggagagcctagctaacacacccggcattccaaagaagggccttcggtcccttatcctgctagtagtttgggaaatttggaaggagcgaaatcggcgaatctttgatcacaaagagatggcaacaggtgttctcctagcaaaaatcaaagaggaggccagcttgtgggctttagctggggctaaaagattgcgcgagctcatcccgcactctgtatagtgtatagtctaaagatctttttgttttatccctaggggttgtattttctccttctatattcaatgaaaaagcactgctgtgctgttttttccgttcaaaaaaaatatatatatttggtcaagacaagcctgcatgttatgaagatgacttcattgatattgcaagaaaaatttccaagaaattgaagggttttccactagcagccaaaagcgttggtcgattattgaagaataacctttctcaggaaagttggatggaagttcttgaaagaaatgagtggaaaaatcggcaaggtgacgatgacataatgccagcactacatagtagctatgattatcttccattttatctaaaaaaaatgtttttcttgttgttccctttaccctaaggaccactggtttaataaattagagattactcattttttggaagcattaggcatcctatgttatggatgtcaaaataacaaagatgctgatataggattaaagtatttggatgaactggtaggtaatggttttctcatgaaggaaggtgatgatagtaggccatattatgtaatgcatgacttattacatgatctagcacaaaatatttcgtcacaagagtgcatcaacataagttcatatagttttaggtctaatagcatcccgcaatctattagacatgtatccatcaccttacaagataagtatgaggaaagttttgagagagaaatagaaaaattcaagaaaaaaatagacataggaaatttacagacattgatgctttttggagaaagcaatgcaagcatggcctttttcaaagacttattaaaacaaacaaaatgtcttcgtgttctgtttatgcatgcagactcactcgaatcattcccacacaacttctcgaaactgatccaccttcgatatctaaagttgaaaataccttataacgtaaaattgtctctaccaaacgcagtaagtagattttatcacttgaaacttttggacctagggaatagaaattgtattttgccaaaagacattaatcatctagtcaatttatgcctctttcttgcttcgaaagaactttgttccaacattcctgggattggcaagatgaagtatttgcggaggttggaagagtaccatgttaagaaagagggtattgggtttgagctgagtgagctaggggatttgacagagcttggaggtgaactgaaaatatttaatcttgagaacgtgacaacaagggaagaagctaatgaagccaagttgatgatcaaaacaaatctgaaaacattgaagctagtttggagtgtggtgcaacggacaacacgatctgatgttcttgacggtctccaaccacctcctaatcttaaaacacttgtcataataaaccatggtggttcggttggtcctagttggttgtgcagttatatttgtgtaaaatacttgaaatcattccatctagagggtgtctgttggggcaatctcccactttttggtcaactggtgcagctagaggaacttactttgaagagtatttcaggcatacatcagttcggacctgattttggtggtgtaacacaaaaaagtatctcgcacttgaagaaagttgaacttattaatatgccagaccttgtggagtgggttgggggagctcattgccatttgttttcgaagattacaagcatcaagtgtgaaaatctatctatcttctatctatctatctatctattatctattatatactaaaagtccattaaacttactataaacgctcccaagccgccacttggcgctctaataaattagagaaatctaagaaattctaagaaaaaagcaaaacatctgatcctcgattttcacttaatacagcgggcccattattttacaccattagatccatattaaacaaaataaaccccatctcccaaaaatcctctcccgctcccctcatgggcctccactcctcacataaacagtacgtacatgtactaacgttcctccctcgcatcctctcttttctccattccattcatcttctatttttttagataataaatttattatataaaaataattagataactaaataattatatttatttgcaacatattatatttatctatattagccatgtgttttgatatatgagaaatacatcatttgacaaaaactcctacaaatagcaaaaattaataacatatactatcatgtgatcgcaaataatttcatgtcctctttgcttgctcaccttggcctccttaatttctagctagcaaataataaatatccattaaattaaacatcgtgtatcataatatatctatctattatatactaaaagtccactaaacttcctacaaacgctctcaagccgtcatgtggcactcctacatacactcctaagccgccacatgtcatatctctaaagattctacaaattttgaatacaaagaaaatatccgaccgtcaattttcacttaaatcagtgacccattattgccaaaaaaaaggctgaacgctattcatcgggaaaaaagccaaaaagaacgaacatatatgtacgctcacctcaagtaatgaaaaaacacagaaaaatagcataccatccctcgcctgatcttataaaaacattagactattacaattaaatttaagagatgtaaaacaactaaaactgatatttaaaaatcatcgacggttacgaaattatgatatgttactataaatttaccattagatttataacaaaactacaagaaaaactaattccatttatttatttcatcataaaaattataacaaaactaataatatcgattatatcatcatatataacttcataaacatggataacaaaaattatatctatgattattcgaagtaaatatttcattcattatgaaactgtgataagttacaataacattagagtcatgataaaattatcagattgtcatataaactactttcatgtattcatatttttaagtttattgtgaatatactaatttcatgtattcatatttttaatttttattgtgaatatattgcaagaaagaccagatacaaagctcttactatggtacaacctacacagtttatacgtggataacttaaaggtatcaagcatatgtcccgttaatcttgaatgtgtccgacccacttacaaattcttatccaccaaacatcgagctacaattgctaacaaggtatttgtgcatcatatcatatcaaatatctaatatatgatgaacatgtgtaccattagacgcatatagagataaaggacattttataagggacatttgctcatttaacccttttctaaagcttaactaccaatttgatccttttttaaaacaaggtttgctcatttgaccatgtttttcaacatcgaagttgtcgtctgaccctactttcactacatcctgagtttttcatttagaagaaaagaaaaacatgtatttacaagcccaaatgactaaaatgacactgaatacatcaaccttatcctcaagcactcatttgctcattccttatccccccgtctctctctctctctctctctctctcttcaaagcgcgaagggcaggaggagcggtggcggcagcacgacagcagctgcggagtgcccccggctgcttcgcggagggtaggatcggtggcagagaggcaacattgactcgccgacgaggagggccgctggcagtggtcgaagagacggtgacaactcggcagaggggaggcagcagctccatgaagggtaggaggggtggcgtcggctcagtgacgaggaggactgccgacgatggcgaatgggaggcggtggctgtggaggggtggcagcaaccacagatatggtaggaggagcggaggcagagggatggtgtcggctcagtgatgaggaggataggcggtgacggtgaaggggcggcggcacggtgacgaggaggaccattggcgcccacgcacatctccgccattagcttgctaataaggtcaaataagtaagggtagaagtggtatttggggcttttgttaactccgattaatgctcttaagagaagaaggtcagagtgtagcttcggttttgaaaagaagggtcaaatgagcaaagtgaccaaaacatggtcaaatcggtagttagatatgcaaatagggtcaaatgtgcaattgctccattttatattatagattatatcattttgtatcattttataaacatacaaagccaaagacacgggtgatttacttaatctatctaaaaaaacatgtctacggtaataagaatcatagatactgaaaagacagaaaaactcaagagcatataccctaataatacctaatagtaaataaaaattatcaatggctaatccctaggacatataaaattataaagtattattttactagtttattaaatgccctaaagaaccctcctacaacgtctattaaagcctttaacaaataagaggaaactttaaatttcttctgtaatagataaagcatctaaaccttattcctcattaatttaatgctcccattaattttggccattgggccatttcaatgggtatatgtatacacacattatttaataaaaaaacattcatccaagcatgttttctaacaaaaaattatttgagatgtcaggtgaggttgtaatgacctgttgcatggtttagagggttgttgtcaggatgactagcattgagttttactaggttgccagccatccaatgcatcacaaaaagagcccatataggagatatttgtgttttgttgatcgagccaccatcaagagaagccaacatgggaaccccagtacaaatattttttatgactaaatcttctcttaactcaagtatctatgtaatattatttaagtcgtgttggcttgaagcatgcataatttgataacatggtatatctagaaggctacatgttagaacattcaattaacccatcttggaaataataatacttagcaagaaatcaaacaggtaacaaatttctatctttaattttgatatttaattttaatcattggaaagggggagatagagtgaatggttcaaacagttatgttaatattgtccaatttgcaagctaaatgtttttttaaaaaaaagagatatagcgggttgattctgaagtattatcgtactattcaagagtagaggaagtagtaatcgtatccaaaatacatacaaagaaccatcatacataattttagcattcagagaaatagagatgcacgcgcaacgcgcgggctatcttcctagttgtcctaatttctcttcgttgctgcggccatcctcggagtgctctgtctctcatatacaagacataaacaccacatggtttcccaacttgtgtgatcttgacattcggagttgccccaagttgtccctgccccccatgcctcatacttccacgctgacacgtgttagtgtgagaaaaggtgatgaaacactcttgtattttcgggaagaagagctgacagcataccattatgatggtgctttggcactccacaacctgggtaaagtaaaagctatggaaattgtagatatgctgcattttccattggctgacctccaaaatctaaactgcctaacacgacattctttcgaggattgcgataacattgacaatactgttgttctccattcagttcagtcgctctatctcgatgattgtcatcttactggaaaatcattgacaatggtattaagcatttttccggctcttacctacttcaatttgagaatgtttggtgaaaatcatgacatagaggaaatagtgctgcaggccccaataacctgctcattgtgccatatgtcgatatcctccagcaagaacctagttctgccagttgaggacggaggaggtctgcaggaactctcctcactccagtcactcaggatttcagattgtggcagaatgttctctcgatggtgcatggtcgatgcaggagctcgtaccagcaagcccctcccttcttccctcagggagctcagtatttgtagagagtcaagcatgcagtcgatggctctgctctcaaacctcacatctctcacacatcttacactattggaatgtgaagacttaacagtagatggatttgatcctctcattacactcaacctcaaggaattggtggttttaaataattgttatgagaacaattattcttgttccatagcagcagatttgctctcagaaatgacaaggaccaaagtattatctgcaggttccttacaactggaagcacttaaggtggacaatatctcaggagtgcttgttccctccatttgcagcctccttgccgccaacctccacaagttaattttcaaatctgacttgcagatggaaagcttcgatgaagaacaagagcatgcgcttcagctcctcacctccctcaagcaactatattttgccgactgcccaagtctgctttccctccccgatgggttgcatcacatttcttctctccagaaattgcacatatataattgtcctaaaattggattcctacccaaggagggcttcccctcttcattgagagatctagtgttatcagagtgtagcgtcgatctacaagatcaattgaagaaattggagacatcaaacccagatttatttgtacaccacatgaggtaaaaaggaaagaaaaagaagtgttctctcaactactacttatttcagcatccatctgtaaccttcaatactaaactaaaactgctctgctttgtttcctactttgctgtgaaggatgggccgaatcagtctggagatatagcggactatctgcatccgcatgcgagtaacacaatagcacatgcgggccaaaggatcgatcggttcttccctctgcaacaatctggaaggttcttgaaaaaccaactttttttaattttatgtggtcgggaatttatgatctcctttttttagtgcatgcaagcgaccactctgttattcgcccatgtagttcattgcttccttcacctaaccaatgttatattaactgtcagacagttttggtaaccttggctagagactcagcatggtgataatgcatgcagcaggctgatagctatgcggtaaatttgagacgcgccttgccctggtctgacctctacaacatcagttacacctaggtggtcagtaacctctcctcaactcatctcgtctctctctctctctcttgatctctccaaaatagggaagttagaggatatgtcctttaaaactactccctcagtcccgaaataagttaatataatatggcatgtaatattttcaagtaaagtatgctaaaaaaaacaagtatgctaaaaatgactctaaagtatgtatagggtaaaagtattctaggcaatttttaaaatgcctctaaaaggtgtctacacttttgaactcccgaatttagagacaatttgaaattctcttctacaaaagtgtctcaacataaggtttttgttgtagtgtgagcttggcattgagtgtgtattctttctgtggaaacctatcaatccaaaagcttgtccagaactcatcagtttgacatggtacagtaaagttcagacctgcctgccagttcatgtaatcatttgctctttagcttattagccttagcgaaaatttgaatttcagaacttaattttagggttgattttattaattgttttccatcatagtttgttttctggcattgtgtcacgcccacgcctaccatctttcattggcagcttacaacggacaaatgaagaacaatagaacatcattgcttaaaataaagacagatgatgatcaaaagatcaccacagttgacatgagttctgtggagcatcgattccatttcatcatctggtatgttcatctatgtaagcagttttagatgacagcatcaggcccaaatacgaattatacccttacatactcttttgtccttgctctaagtagaaatttaacaaatagtatattatgattgaaacaaatgagtttatatgttttacagcccatctaaacttttcattgagactggtcccaccaactccaaacaacatagaccacacagctctactagactactaataaactggcaatggattctggtgttggtaacagaggcatatatggtctttcttctttttttttaattgaagaggtgcatatggtcatcgataggagaatcattttgagcttattagtttgttaagtcccatttaatcattcattatggaatgctaaaccgattgcacataatactgatataactggaatgacataatatttcttgactactagataataccccgcgcgttgctgcggacataataaataactttcaaacatgcaatatgtgcataacatttgagaagaaaaaagaaaaaactacttattaccatataattgatggagtatatacagtggtaattataactaaatattacatgatggagtatctccccaggtagcagtggttggccaatgcaactaacagaattacaactcaaatatatggctgttgaccggatagagcaagtattaataaacaaaattgaaggccactaaacattactggaaaatgaaaaatatacaccaataaaattacccaaaattatgtactatgtgtttatgaacatagcatgtatgaaaaataacagtagaaaagcaagtaaggtgtcatactgttgtcctcgttaacttgatagcctttattcagcatgacatttttcctagtaccgcttccctcgctgacccattgatctcagttttggaaattctgtagttaatcttgcaaatgaatgccaattgattcatgaataaggtgctagaatatcataaataattgtggtaagaaatgtttatttaactggaagtagcaattattatgcatatcttatcgtataaatatgcgatgaacattaggagcgcatttgtagttgcatagctgatcaggaatgtagtcaaggcatgtagcaaacctaggtgatgagtgatgactactttacaattacaaaactgataataaccataactgaaacatcaatattttatatgtttaaacatctacaaatatagtccaattatcactgatagcaaggaaatcataactaaggtgtcaaactattatataataatggtagaaaattttcatgcttgagtaagatatgggaagttgggaaaaggattattacctcgtatatataattaagtactcatccttgattaactctttggagtgattttagctttcagaaaactccaaaaatatttatatcaccaagctaattcaagagtgacaaaagatacttaaaaacatatctagagtatacatgatcagaaaataaaatgaactttgagacggaagacaacctaatctatttaagagcaaacctgtgtgtctgtgtgtggagaatctgacatcattcttgatgaggaccttatcaaaagtgaaaagcacatcaacgacatagatgtaccgagatatatatagcttcaccagttaaagaccataattaaaataccaaaagaagaaagctccatccgcttagcagcccatatgattgttacttagctcgatgagttcttagatctgatcgggtgacgacaaatcaaccaatagatgcatatttgccacgtcttcaaccacttaagaatgagaagtggtctataattcaggataaataaagaatatgaatcaactaaatcagtagccaagaacctgaaacctggaaaaagaggatacagcaacaataaaattctctgttgggtatcagatttattgaacataaggaaaggggaaatcggtaggtaacctgtgttagatcattgaagtaattggagaggatcgaccaggtgagggctgcatatgaatccagcaagcagagttgcaagaacggtagtaaaacgccagcagcctggtagagtgtggtagatcgacgaataagcgagatgataaattggatatagatgcagaactgataaagggataagaggagaagaaaacgcattaagccattaatggatttacttgataacagccgtgaagtgttttcctcggtggttgtcgacggttttcattaatcatggcaacctaaaggggcgaacaacctttagacatgggagaggaagggggaagcagcgcacgagccgccatgggggcgacgggaggggaagcgccacaccctcatcctgcctccgtgtggcacgggaggcggatgacatgccagcgccggtacgggcgagcacgatgcgggagatggagaggatcacggcgagattgatacgaagggggcggcggagcgagatgcaggagagggaatcgatgcgagcgtgcaaggggagaggagaggagcgatgcgggagagaggggttgatgcgcgtggggccggtgaagcagcgagatgtgggagaggagaggagcgatgcgaccgcttgattgagatcgaacggtggggagaaaatggggtgacgtgaagcaccaggaagcagagaattctagtagtgggaatgatttgtataggtatataggattcctgctaggggaaggtaataaacctgtgattccaaccacacaataatcttaattatctagactacagacactggtggagaaaccctttgtagtcccggttcgtaacccccctttagtcccggtttccaaaccgggagtaccaatccgggactaaagatcgctatctttagtcccgggtgaaataaccgggagtaaagatcgatctttagtcccggttggtaacaccaaccgggactaaagatcgagctgacctttttttttttgcatgcccctgttgctgcatggtttatatatatatatatatatataaaccatgcatatatatgtttcaatacatatatatgcatacatatatatatgtatatatatatatatatatatatatataatattatattatatgtatatacatgcataatatatatgtatttatacatatatatgttatgcaaatgcatatgtatatagatatatatatgaacaaaatatatttacattatagaaaatgtgtacacatgcatatagaaacatatgtagtcatgtattaattacaatccattatatgtcctagctagctacgatttcgacgtagtagtactcgctgctagctcagaagctaaggaccggtgaattgtgtttccgtcgtagtagaattcacccttgggatcaaggatttcttcgttgatgaatcccatgagttgttcttgaaccgccgcgataaattccttgtgtgtggtcaggttatccctcatgcgaataaactatatgaatgtatgaaattgattagtaattaaacaagaaatcgctacgtaatgaaattttgaatttatttgtacgtacatcgagctctcttgtggtgatgatttggtctgcaaggcagtggcaatactcgcacacgtaatagccgcacaagttagttccctgcttttgctttgcgcactacaaataaatgacaaacaacgagagatctaattaatatacacttgtatgtatttgaatcggagaaatataaatgtagagcatgtgtactcacaggaaatttgaacttccgcctaagtctttctctccatttgctgcggaccaaatgacggaaccgataccaagccctacatggagtttaaagctatgattcgtagtagcaattaacataacaagattttcttaattaacaaaggaacttatgacggtacctgtctataagttcgaaaaccttgtcaaacgtagactcttttttatccattgagtcatatacgttgacggtgcaggcctccaggtcgatgagtaaaagcacccagtggaatctgcaatgtgcgtgggatgcattacatatgaaacacttagcaagttcgtacgggaatgaaatttggtatgtaggaagacagtaaaattaaactaactctgtgttgtatggcaacagtatgaacgtcttgtaatgctgcgccttcaggagatggacgagattgtcctctgtttcttgtggatattggtcgagcattgcgacgtttactttccgagggtcgatgaatccagtatcgaaaaccctccgccgtcgggccctttgaatctccattctaaaacgataaaagggagtatattattttctatggtctacttatatacaaggacctaattaattaaaggagacgtatagtaagaaatctaactgaacgatatacttacaaaatccagcaactcataatagagacgtcgagggcgtccagctggtatagttcgtagattcccctgaaattgatccagagaatgtcatctccttgcaagaagtccgtgtccctgatcctcgctccgatcatctctctaccggtggcgctcatctccatgtacagctgatggaacttgtacatttgtgtgggtagggactgcagcagctcaggcttgacaagcggtttaccgagttcgtacatgtatttcacttccgccttttcgattggtgtgactcctagcaattgatccgtagttagaccggtgtcagtaataaattgttctatcgtcatttctttaccggtcaccaacggctcgatctcctggtttggttgctctccaagctgagggactggtttggactttccagaagatgctttcttcagtgttcgctcatagtccgatagcttgatggcctccttgacagatgcagacatacccctgaagaagttcctgacactggggtctataggaatcttcttttctggacttcgaggcttgaattgtctcttgacttctgatgcaacgtaagcgtcaagctcctcttgcgtgcaatcgtaccccgggtccttgatcttggcggcgtcaactttcgccttctttgttgcccttgtgtgggcaagcggtggagctgggggggcccttgactttgaaggtgccggaagaggagcttgcgggggagtaggtgtaggagcacgaggaggagtcggtgcaggatcctgaggagtcgatgctggagcctgaggtggagacggtgctggcggagcatgaggaggagacggtgcaggatcctgaggaggagatggcggagccggaggagatggtgcacgagacgccgcttgtcgcccagggaggatgatgtaccgcctgcgccatagaataatggcatggcatgtgtctcgtagatgcgtctcaccgtctcctccagggtaatccagctcgaggtcctcgtacgcgccttcgaccaactcaacttcgaccttggagtatcctgctggaatcggcctgcagtggtaagtacctgaagggtccgttgggatggccatgcccgacgccaccttcatgttgtgagagattatttattagtaatcaacatatataagcagcaactagcggaatggctaaatcttacctttattgataagttcttcaaaggaatatgcagctcacatggtgtccgctgagtgatgtcatcaacgggacaggtcgattcgtcctgtgtttgcatggcgtccatgctctgtgatcctacctgccccgttgaggcgcagctgctacggtttcctgacgggctcaccattgcaggaggaatggtcggctggggatcatgggaccgatgtgcggccatgcgttcatcaaccttccttgccacctcctcttgcatgttgagttcgtagctcgatacccggaactctaggtctgcaatcttcgcctcggtatctctcttgctcctcatccgactcctgtacgtgtggatgtcctccttgaaaccaatcttccaaggaatcacccctttccctcgagttcgtcctggatgctctggagtctgcagggcgagtgtcagctcgtccctatctctgtctggtcggaacgtgccctgagaggaggcttccactgcatctgttagtcgtcgcgcagcctcttgtatctgatagccgaagaccagtgagccatcagctgggttgagcgttccaccgtgagcatagtaccagaacttcgatcgttccggccaattggctgttgccggttcgatacccctctcaatcaagctagcctccatctgctcccacttcggcatcgcgacgctatagcctcctgaccccaagtggtgatggtacttcttcttggcggcattttctttgtttctttccatcatcgccttcccttgttcacctgtcttatatgcaacgaactcgtcccagtgatcccttagctttgggaatgtgtcgaagttcggtgtctgccccttcagtatatacttctggtacagatctcccttgaagctctgaaattgttctgccattttcttcagagtccaccttttcactttgtcctctgtacccgcaggaagggtgaatgtctcgagcattgtggtccacagcatctctttctccgaatctgggacaaagctctcatgatctccgcgtgcccttgttcttcgccagtacaccgtactgacaggcacgttatcccgcacaacccaaccgctgtgacgtacatagttcttggcggcttcggccggggcactaggacgtccatcttcttccacttccgttatgatgtgccgaccctcaagcttcttcgctgcacctcgttgcccgcgtgccctcttctgtccaacggagggttgactaccactagcctcctcctcctagttcccctccacatccctttccacgtgcccctgctggttcccctccgcatccctctccacgttcccttcctcgttcaagtactggtttggatcctcgttcccctcttcttcattccagtactggctgcttccctccgcgattgtatcgtacaatatctgttcctcatcgcggtcagccatctgttgatacaagaaacatctgctaagtcatgagacatttatgttttaacaatctaagtcatgtatgctaagtgtaaatgtcgtacattagaaccctacacaaccttacgtgctaagtctaattacaaatcgtgatataagctaagtctaggtgacgtatattatacaaccctagctagtaaataattatatactaagtctaattacaaataaaataatcttatattaaaactcaaataatattacatgctaatactaaaatagtcatgtatatgctaagtgtttcgtgcgtatatgctaagtctaattaagactacaatagtcaattgctacttgtcgcaccaattccgtagtcaataattacataccaagtctaattacaaataaagtaatattatattaaaactcaaataatattacatgctaagactaaaatagtaatgtatgctaagtgtttcgtgcgtatatgctaagtctaattaagactacaatagtcaattcctaggagtcgcaccaattccgtagtcaataatgtcatactaagtctaatttgcaataaaataatcttatattaaaactcaaataatattagaacactacacaatcttatatgataagtctaattacaggtctaataatcttaattaattgcattacaaatataacaatcatttatattattacgtcacttgcctgctccaattccttctagggctagctcttccactcaggcttgacggacgactccgacaacacgtcttttctgcaagataaaaaaaatgtattaggataaatgcgaagtaacatatatatatatatatatatacatgtatatatatatatatatatattgcatttcacgttaacgttcgtccttgttagttcgctcgttcacgttccctagctcgttcacgttcgttcgatcgttctcgctctcgttcgttcgatcgttctcgttctcgttcgttaacggcggtgtggcggcatcggggcggcggttggcgcggcggcgtggcgacggcggcggcggcgtggcgttgtggggccgtggcggcggcggcgtggcgtggcggcggtggcgtggcgtggcgtggcggcggcggcgtggcgtggcggcggcggcattgcgcgcgcggcggcgaaggcggcggcggcgtggcgacggcggcggcggcgtggcgttggcatgcggcggcggcgttgcgcggcgtcgaaggcggcggcgtcgaaggcgacggagagagatcgagatcggagagatcgagatgcatgaagggagatgcggcggctctcaccccagagatgcggcggcagcggaggaggcggaggcggcggcgaggacgacgagctcgagacgacggcgagatacggcggcgtcggcgcggggatttgccctaggcagtggcggcgaaggagagaggccgagagagatcgatcggccgaaaacgtttaagtgttggtgaagaagacgagggcgcaccgggaatatatatacccctggatctttactcccggttgttctcaacaaccgggactaaagatatctttagtcccggttgttgagaacaaccgggagtaaagaaaaaatctttactcccggttgttgagaacaaccgggactaaagatatcttgatatctttagtcccggttgttgagaacaaccgggagtaaagaaaagatctttagtcccggttgttctcaacaaccgggagtaaatatcttttcccgctatttcgaaattctttttaaacccggttagggttaagaaccgggactaaagattataccactgcatatgattttcgcttacatatgtgtttataaaatagaagttaatgcattaacattatttaaagtacaaagattgatgacaattacttcgaaaaattatttttgtctgtaataaattaagtggataaatcgtaataagcaaatatatgacttataattaataaaaattccaatatatatatattcttagcatatatatgaatgatattattatattggtaaaaactctaattaagatattaatgtacatactgcatgatttaaaattaataaaaattgtaatcatcatatgtacttagcgtaggaattatattaaattaaatactaaaaactctaattaacatatgtaaatgccacatgcatgatttaaaccttttaaaaattcgaatagtcatatataagtagcatatgaaagatagtaaattaaattgtgaaaaactctaatatatgaatgatagttttaaaaatatattaaatttaatacttttaaaaattctccagtcaattataattagcatatgaatgatagtaaattaaatgttaaaaactctaattaacatatgaaattgccacttgcgtgatttaaaacttttaaaaatcctctagtcaattataattagcatatgaatgctagtaaattaaatgttaaaaactctaattaacatacatatgaaattgccacctgtgtgatttaaaacttttaaaaattgtaagtatcacatataactaacatatacatgatttaaacttgttgacgctcttcagcgtgccatcgcaacattctagcattccccttgttcctgaacaaacgccttagccgtggtattatagggaaataccacatcaccttagcaggaattctcttctttgttagctgtcacatcctgattttcgtttcaggatttataaattatttaataaattaataatagaatttatattaaatgttcattaatttacatgtgaagttaaatgtgggaaataaaatttcctaaatataaagcatggatggatttaattttttattaaattctccatgattaagtcaactctctggaatattctcggatttttcggagctcaattcctaatttttaatcttacaaagagcatttcagtaattacccacatattaaattaatcattaaatggtctaattataattttgttaagtactttgagtgtccaagtattttcaagatttttcttggaattatttgagcataggaagtatttttcacaattcaaagatcatttcagtgattaatttaattggaaaagtatttaaaatccccttctccttttcgggccgaaataggaaaagttcagcttctatcctcggcccattctcccttcctttcggctggccttatccctcctccaaagtctgctttgtgtccctttttcaatcgggccaagaagtagaagcccagcaaaaagtctagtttgcctccctgctacagtgtcatcttcaatctccagccggctggagacagagcccgagccagccgcacagtacctgtatagccgcggttttcccctccaaatctgacctttccccttgtgtttttctaaaattagttgaggggaaatattcctcttatcctcctctatctttacctccaaaaatcggagcaaatcgttgagtatcttatccgaatcaaactcgttttcgagtttatctccaaaaccgagtttttgatttcccggatcgatttcttgcgggaggagtccgatctcttcaatccaaggctataaataggaccccctagtcctcctctttcgtttgccccctctcccgtggtctcccgtgcctcgtagcgccgccgccacgtgctccaccccgccgtcgtcgccggccgagctccatccgcgtcgcgccgtcgcctccgtcgtcgccgccggtcgccgtcaccgccgtaaggtgcgccgaggtgtggagaagcccggccgctctctccccgctgtcgccggtcaccggagccccgtcgccgccgtcgaccgaagccgtgccgccgctagacctcgtcgccggccgtcgtcgttcgtcgtttggttcgagggtgagtaccgttgggttcgtctcgtcgtcctctacgtgttcatgtcctccaaagtcgcagccgaccatccaatctccggcgaggtcgccatcttggtccggccattgatgaggtcatcatgacgtcatcatcgtttttctttttcctgtttttctaatagattaaatcttcggaaattcataactaaatcatcgtaactcggttttgagtggttcaagttgctaaattcatctaaaatcatgatctacatgtttgtttactttatatgtactgtttatttggtttttattagtctttttcttcgttttgcgtgttagcttgtcgtttccgtcgttgcgaaggttcgtgagtgcgccggaagtattcgagaagattaattgaagaccgattattgcaaggcaagtcacacagatcctaaacacaatcctttgagcatgttgatcctatatttaaattctctatttatttcaactgtgcatttattttcgaatgtcaccgggtggtgtgaacctattcctttgttatggccagtttgcattgattaccctattccttgataccttgggttattataacttgactagttgggctttatatattggttcagctagatattagttatgattgcttagccatgcttagaaacattagcacactattgggataacttatgactcactattatttaaggatggcttaatgatagttcacgatggtcaatcgtgattggttaattaattacttgccaactaaaacttgataatggtgggttgtgagcacatggttttgagagtcgtgctcatgacaattaaggaccggttcgcgagttactgttgtgaaacatttatcgtgccaaccacaagccagcgtgggcaacggctttatcttttgtatagcgtgattcattatagtgcgccagactgagaagtggcgagaagtccacgggggtcgctggggagtccatgccttgtttataaaggggtgattatgatccaggaaaggtgcgctgtaatggattatgttgtgcaaggggtattgtcacaactcctttccgaggtaccgtggtggtattgaggcacatggtgacatgatgtggggttgtgtcttgtgggtacagtggtacacctctggccagagtaaaactattcgaatagccgtgcccgcggttatgggcgggttgagcaatgtttttcgtgattagtctcacacctctcacaataattatggatgttatacttggtaataatttgcttagctcctggtttggagttagatctgtacagccgggtatggttgttcaggatggttgggcctgtgcagcatgggtgtgctgttcagtgttgattaaaatttttaattaattactctactgttttactactcttaactctttgctaaatgctgctttcgcaaatgagcctatattatgccatcctttggtatccttgtgcacttgcatatttgctgtgtggcttgttgagtatgtcatatgctcattcttgcaataatcaatcaaacctcagttgaagataaaggatccagaaggagaagacgtttggcttataccccagttgagctgcctgtgggagtggagctgaagccatcgctagaccgttaattccgctgctgttttcttttcttttgtaagtatgtaacgttattattatgatggatttgtatattaaattgtcagtttgtgtacctcggctgattcctggacgaggattttatgcacaaataagttcggaaattactagtgaatttccgggcgtgacattagctgcccgtcaacttctcctggatcgtcccgtctaatcttgtatcgtagtgctttgcaaacagggcatgcttctaggttctcatactcctcaccgcgatataggatacaatcgttcggacatgcgtgaatcttatgaacttccagtcctaacgggcagactatcttcttagcctcgtacgttgtctcgggcaatttgtttccccccggaagaatgttcttgacgagtttcaataaatcgccaaatgccttgtcactaaccccattttttgccttccattgcaacaactccagagtggtatccaactttttgtgcccctgctcgcaacctgggtacaacgaagttctgtggtcctccaacatcttgtccaatttatgggcctccttttcactttcgcagtcttccctggcgtcctgcaacatctgaccaagatcatccgcaacgtcgttaccatcagcagctatttcctcctcgcccgtttgatttccttcaaatccaacatactgagcaaagtccggaatattgtcgtcttccacttcatcttcttccatttcaacaccttgctctccgtgggatgtccaacaattatagcttggcatgaaccccgactcaaacaagtggaaatgaatagtcctggatgcagaatactccttctgattcttacacttattgcatagacaacaaataaaacccctttgcctgttagcttcggccactctcaaaaaatagtgcacgccgtcaataaactctttggaccgccggtcagcgtacatccattgccgatccatctacatgagtcaaaaaaaccgcacacaaataattattcttacaataatgacagtcatacaataattataagatatctttattcatacaaaaatcataaaatattacaccaaataattcttaaaaactatttgtaaagttttaaactaattttaatgtgttttacttcttttaatttttattttagtttgttttctattatttaatattaactttcactagagttttccttctcaactattttataaaaccttgtttagcaaatgaactaaatttctatatattctttcttccccacacacattttctctctcatcaacttacaactaaattttggagacaaaaaaagtgtgcaaaacataggtgcaaatgtagtatgacaaaaaaaacattggaggatgaagttgcaaaccttttaggcacctccgatttgtatgtaatcaccaaaataaattcaatagaaattttggcatgacctcccctcttttttgaagaaattttgaagcttgctcgggcagctggaggaggaagaagacatatatataggggtgggactttagtcccggttggtagcaccaaccggggctaaagatcaccgggatcattagtcccggttggtattaccaaccggggctaaagttaagatctttagtctcggttggtgctaaagatcccgggggggcctgacaggtcctgacagcattcgaaccgggactaaagatgatctttagtcccggttggtaacacaaaccgggactaaagatcaaatatgcccgttacccttttgaaccgggactaaagatcatctttagccccggtttttattgcatccgggactattgtggaaatcggccgaccgacgaaagatggtttctccaccagtgagagtacaaactgcatatgcagataatactgatgtacgatggattgatggctcagtactagcctacgaaggaacttatgatctagcagatgtttttcgtcctaactcaatgcaaatgttatatctggagtttaccatgcattagcctcgtacttttttttttctttccaggtgacttccaggacaaaattggtgttccatccaacgacagcgtgtaacgcaacctgcactatctgtctccatatcttgaaagaggcaaagagctgcttcttcgttccgggcattccccctgctgttcctactgaagatcacaaaagagatagccggcggtggcgatggtggtggcggaaattgagagccgcggcctgaatgcggggccggcggtggcagacaagcggaggcggcggaaaatgctcgtcaacctggtccgctgggagacgagcagtttccgcgcgtggggttcggctggcgggcgacggcgctctgctctgggtggtggcacactggagagatgaaacatctagagggaaaatggaaagagggggagaaatttgttttgttgccaaaagaaaacaaatttcttcgagtacatattatatatacagtatatcaaatggctctgatttcttcttgtcttggaaattacagcctaacttattagcttagaaggacgcgactataccgagaccggtatcacgatagggctatcgcgcgacgcgcgcatctggcgattccgcaccgcgcgcgcgccccatgccaaaaacggtaaccacctttttcccgggcccccgcgcgtgccatcgctaaaaaaggaaagcacgcgcttgcgcgcgcaagcgccgtgcgatgcacgcctcgctagctggcgtgggccccacctaaaacagcgcgatgcgcctctctccctcactccaacccatccggagacatcaatccacacacagccgccacggtggtaaaaatcagaaaaaaatcgccatcttggaagaggagaaggaggagaagcaaatccaagaaaaaatatccaagtaaagtacacatgaagttcaaattctgtcttctgtgagatccatccacaaaaaaaaactaacctagaaacttttagatcttctctgtattcttcgacaaacaaattgatatgaatctgtgctgtaattttgtgagtaattttgtgagtaatgagctgtagtcttgttttctgtcttccttcttgatttctgtcttcctttataccccaaattcacattctagtgctactcttgatttctgtcttcctttataccccaaattcactttctagtgctgctgagaaaaaaagttgtagagaaggcatgagtactggtgtttcaaaaaactcagagcaatttctaggaacatgcaacttacttccagataaacttgaattcacaatccctagtttacagtttagacagcatgaaaacatcccatctagttacctctcagtgcaatatgaacagaaaagttactttacttcccaaaataaatttgaatttgcattccctagttacataggcatgagtgctggtgttggaaatctcatagcaattttaacagaagtctcagtgcatttttaacagaaaagttacttctaacacttcaatgagttacttccaagaaacattaagttacttctcaccgtgcattaagttacttctcactgtgcattaggttctcatagcaattttaacagtctcagtgcagttttaacagaaagttacttgtaacaattcaattagttacttcctagaaacatggaagttacttccctataaacttgaatttacatttcctagttacacattttgtaccttgtgtctatatacagcatgatgcatcacctagttgcgtctcaatttcatcttgtactgcatcaaaacaaattgtgaaaaaaaaattcattaatatagccactggtcttaatttgagaaaattgcttcctagaaagcatctaaaaaagacatgctgcaaaaactaaaagttacttcttcccccctcccccccaaattactgaattacctcaatgaatgctctgtataaactaactttgttactaatagcctgaaacacatgcagcaaaaatggactttgacctcaacagtatcccggaattagtttctggtgaaaatgaacctccagtacaccatttactagttgatgatgaagacagaaatgaaacatacttccctataaatctgactgacactagcatggagattcctgctataaatttggacgacacttttgactttgaaactatgtatactactggtgatgctggaagtttacaagcacacaatgtagccaatgatgagatgcaagtatttgaagccaatgatgagatgcaaatatttgaaggcgatgatgagatgcaagtatttgaagaaatgtcagatcgtgcagacacaatgcatactagtgttgcaactggcgcaacaactgctactgccaacacaatttcaagtgaagacactggaacagatgattcagaagcacagtcagcgccatcacaggatattccgtgcagcacacaagtgccgtacctcaccttgactttcaactcagaggaggaagcaagggctcactacaacaggtacgcaaagcgcgttggattttcaatcaaaatcaacacttcaaggaagtcagccaaagatggagaacgtgacaaagtaatgtttgtttgcaacaaatgtggtccagaagaaaaaacgggtgaagcgtgccccccaaagaaaatgaaaagaagtagaacaagacaggctgcctgcaaagcaaggatgacagtgaagaggaaaggagctaggtgggaagtaattcagtttgttgaagaacacacacatcctctggttagaaagttttcactcaagaaattcctaaggtcacatagagcaataccgaaagaggaaaaagatttcatcacaatgctgcacggagttaatctctcagctggtacaattattgtcacgaccggaaataacccaacgggcgttccttacgtgcgtgtattattccttgtccaaggaggcaaggtacaccaaaagttgatacaattcagagtttaacaagcggaagcgtaaatagttaattattacatgggcagcgatggcccaacacactcaaagacaatgaaaaacagcggaagactaaggcgacgaccacaggcgcttgacggcaggcacgagctagacaccaaagccttcatcatccaggggctcctcttctgggtttgggaaaaattgagcaagactgagtacaaccaccgtactcaacaagacacacccacaagtgcagcataaatgcaaaggagtacaatggagttatagtataggggttaggttttgcaataaacagcatttaaaagactcttagttgctcaaagctaaatttaaaacacgatcctagaactatttaatattattaaacaaggccgtgaacccaaacgaacctgccttaacccaaggcctacgatgattcagaccgaactggcaacccgaccctgggtctcagctcgtcccaagccaacccaggccaaccattccacattttagttattaagcaggttttaagaatttgaaacactaacttgggtacattgctaggcttgcccataaccgagggcgcggctattcgaataggttttactctgatcagaggtgtacatctttacccacaagacacgtcttcctcacgtgcaaccacgtgccacataccaccacggcatatggacggaagacatgacatagtttccaacccatcctagccatagacaagagtaccgacccaacccacctacggccggaacccccggacaggcaggcagaattgagcccctagcagcaggacaccaggcctgtgctatgacatctcgactaccgggccgcagcccgtgtagccttcatttgtcctagagatgtccatcgacccccgacttcgtccatctccatccgtgtacttttgtttataaccagactgagccacaaactaagccttacccactagacatgtggaagtacggtagtgctttgcaacagaggcccgaagaccggtccttatgtggccgaggtgctactatcaaaacaatgcaccccaagcccagcctaaaaccattttgagagttttgaatagagggggaggtgtgcatccaattccacaataatccaaccattccaatatgtccaggtgatatgaatattcccaaagtctagagttataaaaccacctaatgttgcctaattaatcagcgaagcatctacctaaattcttgctagtggaaccattaatagagtgcccactagttggggttttgtttattctagggtgaacaaggtaataataacaataacaacaataataaggtcataacaaaggtaaataggcatggctaaataaaacagtgataacgcgggaatttaaataaagcgataatgcaataatttaaatcaaagtaatttcacaaagtgggatccaatatgttcaaagaatgatgtgacttcccttgctcgctttcccaaacgtcggcttcaacctccacgaagagcggatcttccgaagctgcagcgtctacacaaccaacagaaaagaaaagggcttttactctaataaactccatataacaagcaggaacaaagcacaaaaatgggttcttgacttcttaaggaaaaattagagacttgaacggtccaattccgagttcaaatggccaagttatggccatttgaagtttatatgcactttaaatgaatatttacgaatttcttcatttaaattttaatttaaaaatagatttattgcgtcagccgggagagagggcgcgcggaccgggtccacgggagtgggacccacgcggcagtctcacggtccacggtggaccgggtgcacccggctcacaccggccggccccgtgggccccacgcgtcagccgcacccgagggcgcgggcggctgatggccgggccccatgcggcagccgctaggcgcgcccggaggcggccacatcggcacggccggcgggaggcggcgcgcccgcgcccctatggtcgccggcggcggccataggcacggcggagcggcggccgagagaggggagggaaagggggaaacgaagcggcggtccacggctcaccccgggtcgacggtgacgacggaaacggcgaccggagcggaggaaggcggcggcgcggctcgggtggacggggtcgacggcgctccggcggtcggcgagcgaaacggaggggtggacgaggtcggcgaggatgcggcgaagccgaaggaggcggcgccgaggtgggaggtagtccggggcgacgacggcggcggaccggagctcggcggcgacggcggagagagagagcgacggcgcgagctcgattccggcggggagagagggcggtgagtggcggaaacggtggtggggagctcggggagggtttatatagggttgggagtgagagagggcggccggaggagggggaaatgggcgcgggagacccggccgccattaatggcgccggcgaggttaggggagaggtttccaaacaaatccgagggagagagggagggaaaaatggggggaaagggggaggggatcccggggaataattccccccactttattgcacgcggggccggcgggaggcggcgggattcgcggcggcggcggcgctaggcgcgggcgaggcggcgggggcggcgggaggaaggggatgacgggtgggccccacccgtcagcgagggaggcgggcgggcccgcccgtcagcagcgcgcgcacggggaggaggccgagtgggccgcggggaggaggagaaagggggagggagatgggccgagccggcccattagaggggagaggtgatttttagggtttttctttttataaaatcattttaactttgtttatttcttaataattattatttgtgctctgaaaattccactaaaatttatttacacattttaggcttttaggaaatatacaaaaatcctccaagccctatttgactttcaactttgcacattttaatttttgaaggcttttaattattctaggcataatttagaggatgtattttagggtcgatttgggacgcgacaaacctacccccttaaacggaatctcgaccccgagattcggaagaactggcgaagagatctggatgggctgccttcagctcgtcttcacgctcccaagtagcttcttcctcggcatggttgctccatcggaccttgcaaaaacggattacccgattcctggtcctgcgctccatggtgtccaggattttcactggtctttccacgtaggtcaagtcttcgcgaacttcaatctgctctgagtcggcctgctcggatggcactcgaagacatttcttgagttgcgacacatgaaacacatcatgcacgttgcccaaggaggcgggcagctccaactggtaagcaacttctccgcgtcgagcaatgatgcggaaaggactcacgaaccgaggggcgagcttccctttcgcttgaaacctgtgtacaccccgcaacggcgttacccggagatacacaaagttatccactgcgaattccaggtcacggcgtcggttgtctgcataactcttctgccgagactgtgccacctttaggttttcccgaatggtcctgaccttcgctttagcttctctcaagatatcggtcccgaacacttggctttccccaacttggtcccacaatagtggtgtcctgcatttgcggccatacaacgcttcgtatggtgccatctgtatgctggcttggtagctgttattgtaggagaactcggcgtaggggagactcttatcccatgtcttcccaaaatctaggacacatgcgcaaagcataacttcgaggatctggttcagacgctcggtctgcccatctgtctgcgggtggtacgcggtgctgaaatttaatcgggttcccaactcttcctggagtttcttccagaaatgagaggtgaactggcttccccgatcagagacaattttcttaggaatgccatggagacttacgatcctagcgaagtagagttcaactagtttgttccctccataggtggtctttacgagaatgaaccgtgctaccttggttagtcgatccacgactacccatatagaatcatatccgccttgggtttttggaagtccggtgataaaatccatcccaatttcatcccatttccattctggcacttgtagaggttggaggagtccggccggtcattggtgctcgactttgacacgctggcacacatcacaaagggccacgaactctgcaatttcccgcttcatactaacccaccaatatttctctttcaagtccaagtacatcttcgtgctgccaggatggatggaatagggactttcgtgagcttcctgaagtatcaactgtttaagttccctgacgtctggaacgtgtggacccccgtttttataacaggaatcaatcgtgtaaacagtaccatttccctggatcaagtagtttggtacccacgaattcatagctggaataccaagtgcacatacacgagtgtctaatacgaattattacatcataggcccgcaggcatagtcttaaatcatcggaccgagcggtccggaatacatccaaaaacagaaatagataaggtagcggaattcaggcagcggcatgccattgccacaggcaacgaccgtactaagacctactgggcaccatcgtcttcgtctccctcctggtagtaggcatagggatcctccgtagcttcatcgcccgcttctgattaattttatatttgcaagggtgagtaccaaccgtactcaacaagccaccacagcaacaatgcatatgaaagggggagagttcaaaggatggctatagttcttttgcgcaaagcaagttttgtaattcttttcacaagcctaagacctagcattgactgatcaaattttagtaccagagtttgtatttaaacaacgacggttctgtccaccatccagtgtgatcccaaggatagtttctcgccattgattcgtcatggttttcggaggacgtccaccttcctgcctctcaggaagtggctccaacggcatagaaatcatcatgcaatatcccatcccacacaggttaagaatttagagtctagccaagtgtaatacatgtcccggtgctcaataaccgcgagcacggctattcgaatagatttggtttacttacactgcagtggatgtacactttacccgcactccacgactgcccaacatatgagcctcgtcccaacacatgagacgcgtcacggcaaagcttttcgataacctcgcattggcagtacccgctccatgaacttaaatcctcatgcactctaggcgtccatgtttctagcagtgagaggagttctggcgctcccgggacagagaagtctcacacatattaaattatggttcaagttaagttctctctctcacacactcatggcagtcctaccaatggcgacaccgatgtagggcacgcctctcggccctacctcaacggctgtcccatcgtagcgcacctgcctcactcaggggtgaaccatctatgcagggatactgcctccgctcggctatctaatccgctaggtctatactcattcgagaagtacggttgtacgggggtcgtttcatgcttaacttcatggctcggtccttaattgaccggggacggtactagcctttcccagataccacccaaatcctccgtccgccccagtcgaaaacaattgtttaattttattttttctttcacaaatcatgtcatcaacatcatggcaatgtggcgctcatgtctccacatgccgcatctcaattaccttcccaaaggtaattgcccaagcatatagcatttgataattatgagtatgcatgattctagaatagcatttctaagcatttgtcatagttgactagggactcatacgtaaacatggttacaaagatttaagggtaaacaataatcaaggcatggcataatcacaagtaggatgttcatcattgcatgcaattttatttgtaaacaaaacaatttcgcaattgggatcaacatgttcaaggaatagtgatgacttgccttgctcgaggtcccgcgggtcttgtccttcacctggatccgcggctccctcggtctctatagttacgtgcgaaaattgatttgaattcggttagaattcaaataaaaatccaagtaaatccaaatggaagtcgaatgcgaaagtcgattcttttatattaactttactattcgcgaactagggcaaaccccatttcaatttaaactattttgcgagtataaatattttgttgtcatgagtttttaatttaacctacccgagcaacatatcaattaataggttagaaatttctatcgcgagctaaacatcggacgaaatcctagaatattatacgacttaatttagtctatgattaaatataatacacggctaacatcctagtaattaaatccgaatcgctaccgttaatcgattacttatagagattacccagaaataatccataataatttacgagaattcatacatttgtttaattattaattacatctaaattaataccgcgaattgattccttatggagagtaataaaataatctataatctataggaattcatccaattatattttcattaatcctatatttaaaagccagtgttttaggtatttaattagtaagatttcatctaactatattttcattaatcctataattaaattctaatatttgcaaatattttaaatttcccccaaaatttttcctttttcttttccctctctctctctctttatttttttcttctcttttctttcctttcctttttcctctcctctcttttcttttcctcttttcttttcttttcattctctcctctcttttcttttcctcttttcttttcttttctttcttttctttcttttctccccctctctctcttttcttttcttcttcctcctcctggctcctttctctcttcccttctcttctctcggaactctctctctccctacccgtggcggcggtgacgacagcacgcacggaggagggggggggggggggcggcggcttaccgacggcggcgggggcgacggcggcgcaaggcggcgacgcacggcgcggtggctccggggcggcggcgcggcggcacgatggcggcggcgcggcggcacgatggcggcggtgcgtggagaaggaggagagggagggggaaatggaggggatgggtgtgggatggagaagggaagggccgggttttataagggcacggggaaggggcggccggcctaatggcgacgcgacgggcggcacggttggcggtgatggcgacgagcgggcggcgcggcgcggggctcggcgcgactcggcacggggctcggcgcggcgacgagacgggcgagcggcgcggcagcggaacggcgatggggacggcgcggcagcggcggcgcgcggctcggagcgacgatgggacgcgcgcggcgacgggatgggcggtgacggggcggcagcggtggcgcgcggcacgaggagggatgcgatggtgacggcgacagcgcggcagcggcggcacggggcgcaaggcgacgcgacgggcggcagcggcgacgcgacagcgggcggcacggcgcggggtgcgatgacgcgataacaacggcgacggcgacgcggcagcgacggcgatggcgcgcggcgggacgaggcgcgaggcgcgacggggacggccgagcggcgcgcggcgcggcaggcgacagcggcacggcggcaggcggcgacggcgacggctcggggcgcgaggcgcgcatggcagggaaggggaaggggctaggggacacggtcgagcacgtggcggccgatgaacagtgcactttcctatttttctcattttagtctattacttttataaatttgattccacaattcctaatttttgcataaatgaagtttactccatatttgtgttatcctaactaaaaaaattcaccctaatttaatatcactcatattttgtttatataatttatttaaatttttaattagggttaattctcatttcatcatactaaaatttaattattgctaatatggttgcgataatattttatttattttccaatcccacctaatctttattttaatttatattttaattatttatttagccaacttgatttttagggtttattcctagttagttattcattattcgcgattaataaattccgagatcaaaatccaatgaaacaggcgaataaaatcatgatgcaatttattacttaaaatgttttgaaactccgtatttttggtgttttgattttgttggtcgaattttcagggtgttacagaacgcatacccgattcccgttccatagggttccgtgttcatcctctgtgaaaccagcggctttaccctgtttcatgttcttgaggagcccatgcatatccggatcattcttctgagcctcgcggatttgatcgagcaaggtaggcttggcttccaacgtagccaagaatccacgaccaactatgcttaggttcagggcttccaactgttgattaagttccggtggaatgccacggacgccaagagtgttgcaatggctttttcgacttagagcgtcggcgactacgttggccttgccaagatgatagtggatccccacatcataatccttgatgagttctaaccatctcctctgccgaagattcagatccgactgagtgaagatgtatttcaaactcttatgatcagtatatatttcacagcgattcccaatgagatagtgccgccagatctttaaagcatgaaccacagcggtcaattccaaatcatgggtagggtagttgccttcatgaggccgtagctggcgtgaggcataggctaccacatgaccttcctgcattaatacgcaccccaatccttggcgcgaagcgtcacagtacaccaggaagtccttgcgagtatccggtaagattaacactggcgaggaaaccagcttttctttgagagtttggaatgctttctcacactgcggactccacacaaatttttcttctttcttcaacaactgtgtcatgggtcgagcgattttggagaagttctcgatgaacctccgatagtacccggccaaacccaaaaagctgcggacttgagtgatcgtcttgggttgcttccaatcggtgacggcggtcaccgtttcggggtccacagcaactcctttagcagatatcacgtgccctaagaacttgacttcggacaaccagaactcacacttgctaagcttggcatacagttgatgttcccgcagctttcccaacaccagacggagatgctgctaatggtcttcctctgattgtgagtacaccaggatgtcgtcgatgaagaccacaacaaacttatccaagtattccatgaacactttgttcattaagttcatgaagaaggcaggagcattggtcagaccgaacgacatcaccgtgaattcatacagcccatatcgcgtggtgaatgcggtcttcgggatatcttcttcacgaatacgcaattggtgatatccggagcgaagatcgattttagaaaagatggtggcacctttgagctggtcgaacagatcatcgatccgaggaagagggtacttgttttcgatagtgacttcattgagagctctgtagtcaacacacatcctcttcgtcttatccttcttctccacaaaaatcacgggagcaccctagggggaagtgctcggccgtatataccccttttccttcagctcttccaattgcttcttgacttcggcaagttcatttgctgccatacggtagggccgtttgtacagaggagttgttcttggagcaagatctatccggaactcgatctcccgcttgggcggcataccgggtagttcttccggaaacacgtcaccgaactcactgacgatggggatttctgacaatcctatctgatgaagttctgaactgccaacagaggttgggggtgcaaagaacacaactggttgttccggccctcggtacagagtgacagtgcgccttgcgcaatccactaccccttggaattgagccaaccaattcatcccaaggatcacatccaagttcttggtgtccagaagaatcaaatccgaggggaaagggattccctggatttctataggaacggccgggctgtaatactttgctgtcatatcccctccaggggtggtgatgagcagagggttcctaagccgttctacccccagttgatttcttcccacgaaaggcacagatataaacgagtgggaagctccagagtcgaacaaaatggtagcaggaatggaatgaatgaggaacgtaccaacgatgacgtccggagttgtcagcacatcctcggcagtcacgtggttcacacgaccccgagcgacgtccttaccaccgttgttggggcggggaggcgcttggccttgctggcaccgcggcttcgggcatttgtccgcaaagtgtccgggctcgaagcagttgcagcacagacgctgctgtccttgagcgtctctgcggccttgaccaggctgcacagctggcgcaggaggacggggtgcacgggtcccttgctgaccctgctgttgctgcggctgtgggacgcgcaccacgaattggggtcggggcgcggagcgaggttgctgctgctgctgctgcgaggaggattgtcacgccctgaaaattttaaaatttataaattgttgtttaaatggaatttctagaaataatttaaagtcttgaagagaagatcttgttttaattaataaattccaatataaaatggggccagataaaatttcattaaatactttgcttaattctataattcctagatttttctgggatttatttgagctaaggaagtatttttaataaatggaattgcatttaagaaataatttaaattgaaaaaggttttaaaaagtctcttttggctttgggccgaaagtcggcccaaatctcttctctctctcctcggcccagccggcccagtccgccgcgcgcgcgcgccctcgctgtcgctgacaggtgggtcccgcctgtcaggtccttcatccttctccggccgccgccgccgaaaccctagtttcgcgccgccgccgtttcctttccaaatccggccgttcctttccttctccggccgaattgaaagaggggaaatgatccttgggatctcctctaccttttctcctttggaatctttggctaaatcgttttggaaagagttggattcgagttcgtctcggatttgttcttcccgagctttccttcgccgttgccgtcgctgtgagccttcgccgccgcctccgagcccctttgaaaggacccccggtgtctcctctacccgtcgccaccttcactttcgcctctcgtcgtcggaagagctctagcgccgtgtgccctagcttcgccgtcgccgccgccgctccagccgtgcgccgccgtcgtttcagccgtcgccgtcgctcgggaagaccaccgtcgtgctcgccaagtcgtcgccgtcctcgttcgccccttcgccgtcgccggagatcaccggagcagcttcgccgtcgtcgacccgaaggttcccgccgcttcctccttgtcgccgtcgccgtccgttggtcttccgccgccgtttaggtcaccggtgagttcgccgtgttgtcctctacatcttggtgccctccgtttgcgtcctagcgccgccgtttgccggtgagtgtgcgccgcccgagccgtccgctccgccgagccgctgccgctgtcggtgacgtcaccgctgacgtcatcggggtcgtccgccgtgagccggtcgtggaccgatcgatctcggccgtccgttttggattggatcgatctcggccgtccgttcgcgtgaaccgtcgcccgtgcgcccggtccaccaaaccctagcccgctgacgcaataattctcttttccttttcaaaaataattcattattgcgtcataattcaatttaaaccgatataagtgttttaatccgatttaatctttaaaaattcataactaattcatcttagctccgatttagttggttcaagtctctaaatttttctaaaattgagatctacacattaaaaatatccacatgtactgttcatgcttgtttatgtgctgttttggtgattttgctcttttctgcttagattccgtcgtttccggagagtccgttttcgcagaagaagagtttgaagagttccaaggccagcaaggcaagtcacacagatcccaaacaaccctttgagcatgttgatcctatttaaagctattgtttctattcaactattgcatctattttcgaatgtcattgggtggaattgacctattctttgttatggccctttcgtacttgattaccttattccttgataccttgggttattacaatttgactagttgagctttatttatattggttcaactagatattagatataattgcttagccctgcttagaaacattagtacacattcgggataactaatgactcactattatttaatgatggtttcatgatagttcacgatggtcaatcgtgattagttaattaattaatgtgccaactaaaacctggtaatggtgggttgtgagcacatggttttgttggtcgtgctcatgacaattaaggaccggttcacgagtttcggttgtgaaacattaaccgtgccaaccacaagccagcatgggcaacggctttatcttttgtatagcatggttcattgcggggcaccagactgagaagtggcggagataagcccacgggggtcgctggggagtccatgccttgtttataagggggtgattatgatctaggaaggtgcgctgcggtggattgtgttatgcgaggggtattgtcacaactcctttccgagataccgtggtggtattgaggcacatggtgacatgatgtggggttgtgtcttgtgggtacagtggtacacctctgatcagagtaaaactattcgaatagccgtgcccgcggttatgggcgggtctaacaatgtctttcgtgattagtctcacacctctcatcattgtaaaagatgcttaaactggtaataatttgattagctcctggtttggaatggtacattcctggtttggagatagaactgtgcagccgggatggttgttcagaatggttgggcctatacaacagggtatgttgtatagcgttggattaatattgtttaattacttaactgttttattaaattctcaaatgtttgctaaatgctgcttttgcaaatgaaaccctattatgccatcctttgttatcctgtgcacttgcatatttgctgcgtggcttgctgagtatgtcatatactcaccttgcaatcattcatcagaggaagagttctacaatgaggctgatggtgtggaggattaggtgtagccttggtcaagctgcctgtggagtggagccgtctgcgccgtttatttattttccgctgcttagatctttattgattgagaggaactatctacctctgtaatgacattttattcgcttattaattagagtaatatttgtactctattatcaatttgttattgtgtgcctcggctgattcctggacgagggttcacacacatgtaagcgtttggaattttggatagaaattccgggcgtgacaagttggtatcagagctcccttgaccctaggttatgccaaatggttatccatagaagccctctaaaaatattggaaaagtagaactgttctcctccctttctcttttaattaaaccaaactaatggcacatgcatttcataatctcttttaatggttctcattcaaaatttattccagtgttattagtactgtacatctattactgtactaatggctcatttaccagcaaaagttttacaatactgttttatttaatcttgctgcaataaaataaatttagcatgttgattttataattttctttcatttcttttgaaaccagttattcaaaattacaaaatttgtgacctcgtttccaactgttttaacttatctcgcaagcttggtttactttatttacttacctttttactttgattttcaaactttattcaaattaatccaaaaacttgtgctattaattggatagatgtcttaactccctcctttcacctgtctttagatgccgcgttacaagcctgagtacctgtttggtgttgagggttttgtccaggagttgcgtacgatgtcctttgtcattggatttggaactgcccctttttatgcccagattgctcatgatcgtcatgaagagaagtgccgagtcaaagtcaccttgaacagtaatagtgaagatatcccctcagtgatgtttgaagctggaggaagaaactacatccatgcatgtcaggaggtggcaaggatcgccataggagagctccgtgatcgctacagtgatcaattggccgacactgagtatcgctaccatcctcgccaaccacagggaagtgaccgtggcagttaccttgagactgaaggaattgagaatgatgttaccacaaagcatttggttgagatgttgtgggctatggatgaaagtcgtgcggagactgtgttagcagcccaagatcgtgaagattggaatcgtggtaagatttgcaagttagaagacaaggtggatcgtttggagaaggaattagccgcattaaagggagaagcaccgccgcagaaggccaggattcgtcttaccgcaaggaagagagctctatttgttcctcgctatcaattggcgccaaaggttcgtgtggtggagaaagaagttgccccagctcaagcggatcctccggtcatcatcataagtagtgatgaagaagaagaatccaagcgcaacaattccaagattgagtgggtagcaacccaagttgataaagacgagccttcaatcgacctccgatgcttggaagaactagagtgacttgttaagccgttgtcttagatcgatgtgttagtttgcttgttttaagtttgcttgtgtgtgtgggtcttgcatgtgatttacatcagtggtgggatgtaagtgcatgcgtttgtttgcttttgagagttaggaagttggtgagtttagtggtgtgagagtctttagtttgtaataataaaactcagttaagatcaataaaagttaaagtaattctctatcttaagtagtttcccccggtttctcttcttgtgccctgcccatgccaaatggtgaacactcacagcaatgggaatggtcccaacaaccccaataacaacaacaatggagagaatcccactcttgctcaagttcttgctcaacagacacagcttatgaacatgatgatgcagcaatttcagaatcagcaaaaccaaggaaataatcatgcacctccccagaacaagttagcagaatttcttcgtgtgaggccgcctgttttctctagtaccactaatcctgttgaagctagtgattggctgcatgccatagagaagaagttggatttgcttcagtgtactgatcaggagaaggtctcatttgcatcacatcagttgcatggccctgcctctgaatggtgggatcatttccgccttaacaggactactgctgaacctatcacttggcttgaattcaccgctgctttccggaagacgcatataccatcaggagtagtgtctctcaagaagaaggagttcaggtcgcttacccagggatctcgctctgttacggagtatctgcacgagttcaatcgtcttgctcgttatgctccggaagatgtgcgcaatgatgaagagcgccaggagaagtttttgggaggacttaatgatgagctttcttacccactcatggttggagattatcctgatttccagaaattagtggataaggctatacgtcaggaggacaagtacaatcacatggagcagaagaaacgtcggattgctcacttcaaggcacaacagggaaataatcagaagccgcgtcttactttaggaccccagtccatgccacagggaggttcttcgtctgttgttcgtccgcagcgtcagttcttcaacaacaatgctggcaacaacatccgtaatcaagctccacgtcctgttgcagctccagcacagcaacaacctgccaagagagagcaaggcagcaagcccgtggtgtgtttcaactgtggagacccaggacattatgctgacaagtgtccgaagccccgacgcgtgaaggttgtccctgcccagaataactctgctgtaccagcatccaaggctcgtgtaaatcatgtcgctgctgcagaagctcaagatgctccagatgtgattttccttgttaactcagttcctgcaacagtacttttcgattctggtgctacacattcattcttatctatgagttttgcgggaaatcatgggatggaagtagaagatcttagacgtcctttgatggttaataccccaagtgatcaagcactttctttgcaacgtagcccctcggtcagaatagaaattaagggagtaccatttctggccaatcttatcttgttagaatccaaagaccttgatgtcatcctagggatggactggttagccagacataaaggtgtgatagactgtgccaacagaaaagtaactctcaccagcaatgatggtcgagttgtgactgttcatgcattgtcatctgagtctttaaggtcaagactgaaccagataactttggaagagattcctatagttcgggagtattccgatgtgttcccagatgatttacctggtatgccgcctaaaagggatatagagtttagaatagatttggtacctggaacgactccgatccataagagaccttatcgaatggcagccaatgagttggcagaagttaagaggcaagtagatgatttgcttcagaagggatacatcagacctagttcatctccatggggagctccggttatttttgtggaaaagaaagaccatacccagagaatgtgtgtggactatcgtgcattaaacgatgtgactatcaagaataagtatccgctacccagaattgatgatttgtttgatcagcttaaaggtgccactgttttctccaagatagatcttcgatcaggatatcaccagttgagaattaaagaggaagatatacctaagacagcttttaccactaggtatgggttgttcgaatgtactgttatgtcttttggacttaccaatgcccctgctttcttcatgaacttgatgaataaggtgtttatggaatacctagacaagttcgtggtggtctttattgatgatattcttatctactctcgaaccaaagaagagcatgaggaacatcttcgccttgcattggagaagctacgagaacatcaactgtatgccaagtttagcaagtgtgaattttggttgtctgaagtgaaattccttggtcacgtcatctcagcaggaggagttgccgtcgatcctagtaatgtggaatccgtaaccaattggaagcaaccaaagacagtttcagagattcgcagtttcttaggcctcgcaggatattatcggaggtttatagagaatttttccaagattgctaagcccatgacacgattgcttcagaaacatgtgaagtacaagtggtcagaagaatgtgagcagagttttcaagagttgaagaatcgcttaatatcagctcctattttgattttgcctgatccaaagaagggtttccaagtgtattgtgatgcatccaaacttgggttaggttgtgttttgatgcaagaagggaaggtggttgcctatgcatctcgtcagttacgtccgcatgagaagaactaccctactcatgatcttgagttagctgcagtagttcatgcattgaagatttggcgtcattatcttttcggtactcgtacagaagtgtacaccgatcacaagagtttaaagtatatctttactcagccagatctgaacatgagacaacggagatggttggaattaattaaggattatgacatgggaattcattatcacccgggaaaggctaatgttgtagcagatgctcttagcaggaaaagttattgcaatgctacagaaggacgacagttgccattggaattatgcaaggaatttgaaagattaaatttgggaattgtcagtagaggtttcgttgcagccttagaagcgaagcccactctaattgatcaagtaagagaagcccaaattaatgatcctgatattcaagagatcaagaagaatatgagaagaggaaaagctatcggtttcttggaggatgagcaaggaactgtatggttaggtgaaagaatctgtgtccccgacaacaaagatttaaaggatgcaattctgaaagaagctcatgatactttatactccattcaccctggtagtactaagatgtaccaggatctcaaggaaagattttggtgggcaagtatgaagcgtgaaatcgcagaatacgtagcagtatgtgatgtttgtcagcgagtcaaggcagaacatcagaaacctgccggtttgttgcagcctttgaagattcctgaatggaaatgggaagaaatcggtatggattttatcactggtttacccagaacgtcatcaggccatgactctatttgggtgatagtcgacagacttaccaaagtggctcatttcattccggtaaagacaacctattctggaagtcgattggcggaattgtatatggcaaggattgtgtgtttgcatggcgtccctaagaagatagtgtctgatcgaggcagtcagtttacttcaaatttttggaagaaacttcaggaagagatgggttctaagctgaactttagcactgcttatcatccgcagacagacggacaaaccgaaagggtgaatcagattttggaagacatgttgagagcttgtgctttagacttcggtggaagttgggataagaatctaccctatgcagaattttcgtacaacaacagttatcaagctagtctacagatggctccttacgaagcgctgtatggtcggaagtgccgcactccgcttttgtgggatcaaacgggagaacgtcaggtttttgggacggatatcctaagggaagcagaagaaaaggtaaagatcattcaagaaagattgcgagtggctcagtctcgacataagagttatgccgacaatcgccgtagagatttgagttttgaagaaggagactatgtgtatcttcgtgtcacgcctcttcgaggagttcatcgttttcacaccaaaggaaaattggcaccgcgttttgtgggaccttataagattgtcagtagaagaggagaggtcgcttatcagttggagttacctcaatctttggcaggagtccataatgtgttccatgtttcgcaattgaaaaagtgtttaagggtacctaccgaagaagctaatcttgatcagatagaagtccaagaggatctgacctatgttgagaaaccaatccgtatcttggaaacaaatgagagaagaaccaggaatcgagttatccgtttttgcaaagtccaatggagtaatcactcggaagaagagtccacttgggaacgagaagatgaattgaagtcagctcatccgcatctgttcgccagttcttccgaatctcgaggacgagattctgtttaaggggggtaggtttgtcacaccctgaaaattttaaaatttataaattgttgtttaaatggaatttctagaaataatttaaagtcttgaagagaagatcttgttttaattaataaattccaatataaaatggggccagataaaatttcattaaatactttgcttaattctataattcctagatttttctgggatttatttgagctaaggaagtatttttaataaatggaattgcatttaagaaataatttaaattgaaaaaggttttaaaaagtctcttttggctttgggccgaaagtcggcccaaatctcttctctctctcctcggcccagccggcccagtccgccgcgcgcgcgcgccctcgctgtcgctgacaggtgggtcccgcctgtcaggtccttcgtccttctccggccgccgccgccgaaaccctagtttcgcgccgccgccgtttcctttccaaatccggccgttcctttccttctccggccgaattgaaagaggggaaatgatccttgggatctcctctaccttttctcctttggaatctttggctaaatcgttttggaaagagttggattcgagttcgtctcggatttgttcttcccgagctttccttcgccgttgccgtcgccgtgggccttcgccgccgcctccgagcccctttaaaaggacccccggtgtctcctctacccgtcgccaccttcgctttcgcctctcgtcgtcggaagagctctagcgccgtgtgccctagcttcgccgtcgccgccgccgctccagccgtgcgccgccgtcgtttcagccgtcgccgtcgctcgggaagaccaccgtcgtgctcgccaagtcgtcgccgtcctcgttcgccccttcgccgtcgccggagatcaccggagcagcttcgccgtcgtcgacccgaaggttcccgccgcttcctccttgtcgccgtcgccgtccgttggtcttccgccgccgtttaggtcaccggtgagttcgccgtgttgtcctctacatcttggtgccctccgtttgcgtcctagcgccgccgtttgccggtgagtgtgcgccgcccgagccgtccgctccgccgagccgctgccgctgtcggtgacgtcaccgctgacgtcatcggggtcgtccgccgtgagccggtcgtggaccgatcgatctcggccgtccgttttggattggatcgatctcggccgtccgttcgcgtgaaccgtcgcccgtgcgcccggtccaccaaaccctagcccgctgacgcaataattctcttttccttttcaaaaataattcattattgcgtcataattcaatttaaaccgatataagtgttttaatccgatttaatctttaaaaattcataactaattcatcttagctccgatttagttggttcaagtctctaaatttttctaaaattgagatctacacattaaaaatatccacatgtactgttcatgcttgtttatgtgctgttttggtgattttgctcttttctgcttagattccgtcgtttccggagagtccgttttcgcagaagaagagtttgaagagttccaaggccagcaaggcaagtcacacagatcccaaacaaccctttgagcatgttgatcctatttaaagctattgtttctattcaactattgcatctattttcgaatgtcattgggtggaattgacctattctttgttatggccctttcgtacttgattaccttattccttgataccttgggttattacaatttgactagttgagctttatttatattggttcaactagatattagatataattgcttagccctgcttagaaacattagtacacattcgggataactaatgactcactattatttaatgatggtttcatgatagttcacgatggtcaatcgtgattagttaattaattaatgtgccaactaaaacctggtaatggtgggttgtgagcacatggttttgttggtcgtgctcatgacaattaaggaccggttcacgagtttcggttgtgaaacattaaccgtgccaaccacaagccagcatgggcaacggctttatcttttgtatagcatggttcattgcggggcaccagactgagaagtggcggagataagcccacgggggtcgctggggagtccatgccttgtttataagggggtgattatgatctaggaaggtgcgctgcggtggattgtgttatgcgaggggtattgtcacaactcctttccgagataccgtggtggtattgaggcacatggtgacatgatgtggggttgtgtcttgtgggtacagtggtacacctctgatcagagtaaaactattcgaatagccgtgcccgcggttatgggcgggtctaacaatgtctttcgtgattagtctcacacctctcatcattgtaaaagatgcttaaactggtaataatttgattagctcctggtttggaatggtacattcctggtttggagatagaactgtgcagccgggatggctgttcagaatggttgggcctatacaacagggtatgttgtatagcgttggattaatattgtttaattacttaactgttttattaaattctcaaatgtttgctaaatgctgcttttgcaaatgaaaccctattatgccatcctttgttatcctgtgcacttgcatatttgctgcgtggcttgctgagtatgtcatatactcaccttgcaatcattcatcagaggaagagttctacaatgaggctgatggtgtggaggattaggtgtagccttggtcaagctgcctgtggagtggagccgtctgcgccgtttatttattttccgctgcttagatctttattgattgagaggaactatctacctctgtaatgacattttattcgcttattaattagagtaatatttgtactctattatcaatttgttattgtgtgcctcggctgattcctggacgagggttcacacacatgtaagcgtttggaattttggatagaaattccgggcgtgacaaggatccccctggatagggattggtgtagcggaccctttggttagccccctgttgattgaggaaattcgccaagtgacgcttgtgcgactccagttccttgtgcttggcttccaagcggatgctcttgtccaccagacgctggaaatccggataatccccggagaccagacgcacagatagctcagggtccattcctgccaagaacttctcctgcttttcctcatcttcccgaacatcctccggggcgtaccgggccaggttgttgaactcatgcaaatactccatcacagagcggttgccttgcttcaactcccggaattcccttttcttaagggccatgactctggcaggcacatgggtcctccggaaagcggcggtgaagcgggcccaggtaataggctgcccctcgggctgcgtagcctggaagtggtcccaccatagagatgcgggcccctgcagctggtgggtggcaaagatgactttctcctcatcgttgcactgcacggtgtctaacttcttccccacggcatgcaaccaatccaaggcatccacggggttattggagctagagaaggtaggcgggcggatgcgaaggaactcggcgagcttagaatgctgcgggggtggtggtggaggtggagcattatgctgtggtggattttggatgtggtggaggaaagcagccatcatgttggcctgctgggcgaggatttgagtgaggatggggttggtgtctggtggtggtggtggtggcgggggaggaggtagaggtgggccaccttggatgttggggttgctaccttcgggttggttgccatcaccagtagcagcagttctcctggttgtcaccatctgaaataccccaaaacaaaccagccaacagagagaacagactattaaaactaaccacccacgactaccaaaattattgaacttattactgatataaaatgggttcattaaggttcaggatgcttaagccaataaaataaagacaggctccgacacaatcataccacacaccggtacaaccatgccccacacgacttcaacaggaagacaaacgagaaagaacacactcgcaagcctactaactgctcgtctacttctgcgacgggccagggcggaaggtgagcagcagcgcatcctccgtgctaccaatgccggaggtttccccctcctgaggaaccacgggcgcgggctcggcacgaggggtctccacgaagcaggtccacgccagggactaacgaacaagctcaggcctggaggtgctcttgcgggcagtgatcttctggctgcggcagacgcggcggcgcttgggacggcagacctctccctgggcgaccttgagctgacacagctgcgcctccagcgcgtctaggtccttcttcagctgcagattctcctgacgcagctccaggatcttcatgttgttctcgaccatcccacggcgcaccatatgatggaagtcgatacgggccgcgtcgtacgcctccaccatgcgcgccaggtgcatgatggtagcgtcatcctccgagctagcatcccggaaggtggcgtagtcgcgggctcctccgcgacgagggtggtagcggtagggcgagtgctgcaactcgtccgggtagcgctggtgaagagtgccgatggcgaggagtgcggcgttctggcaagcagcggagaaggaatctcctcccgtggtgactgccaacgaagtcctctcgggagagccagtgaggatcactgcagtgacctcccaagcagcatgcgactctgcatcgtcaccctcctgctccgggagctgcttgccttggtagtccactccatgcggataccccaggacaacgcacatgccccgcagctccagaacaaagccggtcaggtccaggccacgacggttgatgctgccggccatctacaagcaaggacaaaaaagagagaaaatattttagagatcagcttttgatgacaaatgaagcagcaagacagagagagactaaaggattttcacaaataagagaggatttttatttcgaaaatattgctaaggcttgggatctaaggctcgtcctagggtcaaggaggctctgataccaacttgtcacgaccggaaataacccaacgggcgttccttacgtgcgtgtattattccttgtcccaggaggcaaggtacaccaaaagttgatacaattcagagtttaacaagcggaagcgtaaatagttaattattacatgggcagcgacggcccaacacactcaaagacaacgaaaaacagcggaagactaaggcgacgaccacaggcgcttgacggcaggcacgagctagacaccaaagccttcatcatccaggggctcctcttctgggtttgggaaaaattgagcaagactgagtacaaccaccgtactcaacaagacacacccacaagtgcagcataaatgcaaaggagtacaatggagttatagtataggggttaggttttgcaataaacagcatttaaaagactcttagttgctcaaagctaaatttaaaacacgatcctagaactatttaatattattaaacaaggccgtgaacccacacgaacctgccttaacccaaggcctacgatgattcagaccgaactggcaacccgaccctgggtcccagctcgtcccaagccaacccaggccaaccattccacattttagttattaagcaggttttaagaatttgaaacactaacttgggtacattgctaggcttgcccataaccgagggcgcggctattcgaataggttttactctgatcagaggtgtacatctttacccacaagacacgtcttcctcacgtgcaaccacgtgccacataccaccacggcatatggacggaagacatgacatagtttccaacccatcctagccatagacaagagtaccgacccaacccacctacggccagaacccccggacaggcaggcagaattgagcccctagcagcaggacaccagccctgtgctatgacatctcgactaccgggccgcagcccgtgtagccttcatttgtcctagagatgtccatcgacccccgacttcgtccatctccatccgtgtacttttgtttataaccagactgagccacaaactaagccttacccactagacatgtggaagtacggtagtgctttgcaacagaggcccgaagaccggtccttatgtggccgaggggctactatcaaaaccatgcaccccaagcctagcctaaaaccattttgagagttttgaatagagggggaggtgtgcatccaattccacaataatccaaccattccaatatgtccaggtgatatgaatattcccaaagtctagagttataaaaccacctaatgttgcctaattaatcagcgaagcatctacctaaattcttgctagtggaaccatgaatagagtgcccactagttggggttttgtttattctagggtgaacaaggtaataataacaataacaacaataataaggtcataacaaaggtaaataggcatggctaaataaaacagtgataacgcgggaatttaaataaagcgataatgcaataatttaaatcaaagtaatttcacaaagtgggatccaatatgttcaaagaatgatgtgacttgcctttctcgctttcccaaacgtcggcttcaacctccacgaagagcggatcttccaaagctgcagcgtctacacgaccaacggaaaagaaaagggcttttactctaataaactccatataacaagcaggaacaaagcacaaaaatgggttcttgacttcttaaggaaaaattagagacttgaacggtccaattccgagttcaaatggccaagttatggccatttgaagtttatatgctctttaaatgaatatttacgaatttcttcatttaaattttaatttaaaaatagatttattgcgtcagccgggagagagggcgcgcggaccgggtccacgggagtgggacccacgcggcagtctcactgtcgacggtgtaccgggtgcacccggctcacaccggccggcgccgtgggccccacgcgtcagccgcacccgagggcgcgggcggctgacggtcgggccccacgcggcagccgctaggcgcgcccggaggcggccacatcggcacggccggcgggaggcggcgcgcccgcgcccctatggtcgctggcggcggccataggcacggcggagcggcggccgagagaggggagggaaagggggaaacgaagcggcggtccacggctcaccccgggtcgacggcgacgacggaacgggcgaccggagcggaggaaggcggcggcgcggctcgggtggacggggtcgacggcgctccggcggtcggcgagcaaaacggaggggtggacgaggtcggcgaggctgcggcgaagccgaaggaggcggcgccgaggtgggaggtagtccggggcgacgacggcggcggaccggagctcggcggcgacggcggagagagagagcgacagcgcgagctcgattccggcggggagagagggcggtgagtggcggaaacggtggtggggagctcggggaggatttatatagggttgggagtgagagagggcggccggaggagggggaaatgggcgcgggagacccggccgccattaatggcgccggcgaggttaggggagaggtttccaaacaaatccgagggagagagggagggaaaaatgggggaaagggggaggggatcccggggaataattccccccactttactgcacgcggggacggcgggaggcggcgggattcgcggcggcgtcggcgctaggcgcgggcgaggcggcggaggcggcgggaggaaggggatgacgggtgggccccacccgtcagcgagggaggcgggcgggcccgcccgtcagcggcgcgcgcgcggggaggaggccaagtgggccgcggggaggaggagagagggggagggagatgggccgagccggcccattagaggggagaggtgatttttagggtttttctctttataaaatcattttaactttgtttatttcttaataattattatttgtgctctgaaaattccactaaaatttatttacacattttaggcttttagaaaatatacaaaaatcctccaagcccaatttgacttttaactttgcacattttaatttttgaaggctttcacaagcattttaattattctaggcataatttagaggatgtattttagggtcgatttgggacgcgacaattatgcaattgatgtctgaattgtatggaggggctaggaatgtaccctacactagaaaagacataagcaatttcaagtcaaagttggggagcgagtataggagtataggtgtagagatattcctgaaacaattgctcacttcgaggaaatcaaaaaggatgacccaaatttcttctacaagattcaacttgatagggaagacagggtgcagaacatattttgggttgatggagcagcaagaaatgcctacaatgacttcaaagattgcatctcgtttgactgcacatatatgacaaacatgtataacatgccttgtgcaccattcattgggataaacagacatgggcaatcaatacaggtactccttttttttgcaaaaaagtaattctaaaaaatctgtaataactttggaaattatagtacatcataagttacttgttgcattcattgagttacatcaagtcctgataaaagttacttccagtagaatgtgaagttacatttttttaaaaaaaaaaggtaaaaaagtaactaagtttacaagttacatttttagtgtttgttctatagttcaaaattgtactgatttacttccagcaaacacaaactgtacaaactacgcaaaattgtagtaacttacttgcttcaaaactgtactgacttccttatgtgtattatttttgatattcagctgggttgtggatttctatggaatgaaaagacagaaacctttgtatggttgtttcaagcatttctagaggctatggaaggtgtagagcccacaaacataataactgatcaagacctagctatgaaggcagctatagcgctagttttcccacatgctaagcatcgcaactgctgctggcatataatgcagaatgctcagaagaagattggccatatattagatcatgacaaagcattgtgtgatgcattcaatgactgccttgacaacagctggacagagcaagagtttgatgctaaatgggatgcaatgttgacaacatatcatttacaagatagtgagcacttccgacacctttgggaaatgagacggtgttgggtcccagcatactttatgcactgtttcttccctttcctccagactacagcacggagtgagggatttaacgcagtgctgaagcgctatgtaaatcctcaaaacagcatatacaacttatttttgcagtacaagaagattcaagaaaaaatcactgttgcaacagatcagaatgagtttgaagcagaagaaacaatcccttctatgtgggctaactatcccatggaaacaaaagcattggaggtctacacaaggcctatattcaacagatttcaaaaagagcttattgcttcaacatcatataaattgacctgaacttctgaaaacatgtatctagtagaaccgaatggaggtcctgttaggaattatggatcaagggcattcattgtagctgcaaatgtgttggacaggatatacaactgtgaatgctgtaagttcgaaagggatggcattctttgctgtcatgttctgaaggtaacagtctgttattgcagtaagctacttctcactgtgcattaagctacttctcactgcacattaagttacttcttaatgtgcattaaattacttcttatgcattacgcacttttggcaggtaataaaacatatgtttttttccatgcaggtgatgacatttgattttgtgggccaagtgagtgacattccagaacactacatattgcctagatggacgatggttaaagagcctgaattgcctccagttacaagcattggtgaacaaatgcaattgccccctaaatctctgaagctaatcaggtataccaatctgtgcacaaaatttacacagattgcaaaagatgcatcaagcaacgagaaagcctaccgtatggctctacagtgtatgagctcaatgactgatgacttagcagctatgaagcagagtagaaagaaacagaaaaaagcacagccagccccatctgatcctgcaagaggaatttcagatatcccctcagcatcaactaacccaacactacagataaatgaccccccccccatcatacaaaagcaagggagaccagtttcaacgagacgcaagcctggggtccatgcaaaggcgtcaaagacatcagttaggaaaggcctagctagtactgagaagtgaattagagctacgagatgtaacttataatgttgtgacaagattgttgaaacttacttgcacagttgcattaagttacttttagcttccatagtagttacttcacagtgatatgtaagttctcaggaagaccatgctgagttctttgcagaaccaagatgctattttaatttgttacccaacctaatttatgtggctataacttatgtgctggttctggaaaaaaaatgcagtgtttcattactttaccttaagtgtaggatcaggctctttgccccataatacttgcatccattgcacacgatttccttgaaacgagagtatcttgtgtgtaagtagtttcttaatgttggggatgtcacttggttcaaatgctggcaactgtttgccatcccacaactccacaaatttcagcatataaaaaccacaatcccggctgtttttgtttgcaaaaacaaaatagggataagtttgactaaagacaataaatgaaaatcactaactaaaaaaaagcatgttacgtacgtgttatcttgctttgggccatcaatgaaaatcagtgggtaattctagatggttttcttcgaaaacctcatgtaaaacctatcccacatggtcttgatggatgcaacaacaagatgagatgctgaaatcagtgcttcgtcatcttctcccctcagcgaatcataaacctcgaatctttcagctttcagattaaggcacaccacgaaatagtgactagccttatcattcccattacccaattcttggagaatgggaaaaaatgcctgcattcaagtgaaaagagggaggggagtggaaagaaggtttttcagtaaatataatcatgatttagtaagtataaaaggataataaaaagtgattcaaaataacatttcctgtcaatataacagaaaaagttacttccacaaacatgctgagttaatttgcaaagacatttaagttacttctacaagcagacaggaaaaagtaactttacatatcattgacagctggaatatatattttcttactaattctttatggtcaagatggttcgctctcgtttgatcgaagtgtttcttgagctcattcctgtccaactgcgaatccaacaaatatccctgcaccatgtggaaaaaaaaacataaggtgttgcaatgatagtaatagtacattaaaaagagattttaatttgtaaattttatatactcactcctattctggcaggaaaaattctcttcgaattgtccttgatatcagtagacagaacaattaatgccaattcacatgtgttattgtccagtgagcccataggtttgacagagttcgcaagatcgctaagataaatataatattctcctgtatcaatgatcttttggctacatttaacaaaagcaaaaagaaaaaaaataaataagcaaattagtataccatgtacaactactgtagcatgttaaattaatttcaatgacatggtaagttactttcaatgacatgttaagttacattcagtgacatgttaagttactttcagtgacatgttaagttactttctatgacatgtaaagttactgcacaggggtgtgtagaaagtttgtctggaaaaaattgctcggtcgtgtgcagaaccaatatgcacacaacaaaaaatggaaggtatgaaccaaaatgcagttgcttcaatggcatgtgaagttacttatataattttacttctctgagaagtgaagttagttctacaaagatcattttactaaaaaagtaaaaaagtactgtgtacagcaaaaaatatgtgattgtacctattccttcttgacttggttctccctccattcttgcaaatgtcatcatatacctcgtttataactcgagaaaccatgaactgcttcttgttctcataatcaattaagggtgaccttttgaatttcgctggtttcaccacccttttattgtactcatggggcacaggtgtttcttcttctacttcacaagcaataggttccttggagattacttcagcgacaggtgattttgtggcagatttgctggcaatggcctcatctgcttctctcccaaccttttcatagtcttcagtagtaaaacttccatagtcctcatttgtgataattccaggaaattctttaccttgagatgttcctgctgcttcttgcccctttggtgttgcacaacttcctgagagctatcaaaaccaagattgaagtttggaacttcatgtgaatcaatggttgttgttaggaaaggatatttttctgcattttgcactggttgcttctctgattctggaacattttgtgctacagcattgggtgcttgcttttcttcatgttttttcttgtcaccaaacccaataccttcatctacttgtttcccttttccaataacatcatcagcgcctttgccaccgcagccaatcccttcatttgtgtcatctcctttgcattcagtaacaccatcaacatctttgcctccactgccaatcccttcatttgtatcatctcctttgcaaccagtaacatcagttgcagcatcagcctgctcaccactccttccagttttagcaccatcatcgtcatcattttctgacctatcctcatcgtcatcttcttctccttcatcatcgtcgtcttcgtctccttcatcctcatcatcatcagaatctccatcttcatcagtatattcatcttcctcagtgtcttccacttcttcttcatcagcaacaaaatcttcatcatcacttgaagttacatctaccaaaaaagaacaaaaagtaacttagtgtattgtaggaagttgtttggacaaatgtaaaaaaactaaaaattcagttgaaatcattgtaaaaaaaacagtgtggtagaacaatgatactaatgagattcaaattgtgcagagtggtagagcatggctaaattaattattctgtacaataattaatagaaacatagtgaaaaaaccaaacctagatcttcatcttgctgaactctttttgtccattgtgcaagtttcttccggttcattcgcattttccttggttggctacccctaggatccacaaaatcaaggccggaaatctgtctcacaaatttcgtgaccaaacctgaaaacccttcacacaaattttgcacagcgatcacaattctgtccttttcctgtataaaaagaaaaaacagagaagttacatatgcagatttcacaaagttacttttgcagtttgttgatgttacatttaccaagggtacaaaaagtaaaacagagaagtggggaaaaaatataaacctgctgctgcatagtattgggcacatttgaatttatgaaggttgaaaaatctacattgctcccaaacaaattggtcccttcatgctgaaaactgctcctaagctatattttcaattataaaatccgtaagttacgaacaaacaaaaaactaaaaatgatgcaagtatgccaactataaaaaaaactcactggtaaagctccaaaggagccgtctgctgatgtgtcagctaatattgcttgatttatcatttcattcgtccaaacagtagctcgataaccctccactggaacattgagatttttaaacgaaagcgagtccaaataaagaatctacaaaagaaattagagcatttagattaattaaaaaaagtacataacttgtttgatttaaaacctacaaaatatgttaacttccagatgtaatttaaatttaaaaacaaattggaaaaaaagatgtggcagggcatatatgaagaagtaacttaatgcacagtgagaagtggcttaatgcacaataagaagtagcttaatgcacagtgagaagtaacttaatgcacagagagaatttacttgacagaaaattatttataacaatttaacagaaagaagttacttcctaggaacatgttagttacttcctggacagcttaacttacttctaaaaaacataaaagttacattgggacagtgatcaaataaaaaaaggcgagcattgttaccatcatatacaggagacatgctgagttggtattcttcccagctttagcagctttttgcaaaatagatatgataaacttgcaccaattaagattcttgacatttccagcatcaacaacagaaggatagcatcttgggctgactgttgttgccgtcgttggtgctaaaacagaagaaatggcgtagatgatccacatgcgcaggtacttgtcatctgctaacttcaacttctccaattgaatcccaagagaagtcagtgatggtgagataccatcattgattccaagcaaattcagcacaaattctgtagcttcagattccatctcatatgagacatccttgtcgcccattgggataccaagtacagacttcactgactcctcgttcacatctatggctccacgtccagggaatacaagctgattggttgctggattgaaatgctccatcaaccagctgcacaaatcaggtctgagcttcgagcacttgagatctacgaggccatggaagccagccccctctattagtcgcttttgttcgccactcatatggggatacaactttataagtttcataggtgaagccctgctactttcttgctgcaaatgtataaaacaacaaaaagaaaaataaaaaaacatcagcatttgtttattttttaaaaaacatatataaaacagttgaaaaaagggtaactgaaccaagaagtaacttgccattaagttagttctagaaaataacttgccctcaagcagcagcatcaaaaatattttaggcacggtgagaagtaacttaatgcacatagagaagtaacttaatgcaaagagagaagtaacttcaggcacatcgagaagtaacttcttacttgttaacagaaaatctcaaagtaattttgacaggaagttacttctaacaaaacagtaagttacttcctaggaacatgcaacttacttccagataaacttgaatttacattccctagttacacagcatgatacattccatctagttgcctctcagagcaatttgaacagaaagttactcgttataaaactcaaaaagttacttcctagaaacatgcaagttacttccaaaaataaacttgaatttgcattccctagttacatagccatgagtactggtgttggaaatctcataggaattttaaaataagtaacttaatgcatagtgagaagtaacttaattcacagtgagaagtaacttaatgcatcataagaaaatatagtgcattggaaaaagcgaaacactgcttgagggcaaaaaatgcataaaaaaaggtggatgcttaatacctttgatctgctcctttttggaggaggttcctctatgtcatctgcatgatcatctccaatacttcttttcttagcacgttgcgaacccccccttgttttttcacttggctctggtttgcctaacatgcctttctgtacaatggtttttctttttcccattcctggaaatacattttggatgttagtaatcaacttgcaactaaccatcgatcaactaataatcaacttgcaactaacaatgttagtaatcattttggaaattcattttggatgttagtaatcaacttgcaactaaccatcgatcaactaataatcaacttgcaactaacaatgttagtaataattttggaaattcattttggatgttagtaatcaacttgcaactaaccatcgatcaactaataatcaacttgcaactaataatgttagtaataattttagaaattcattttggatgatagtaatcactagtaatcaacttgcaaccggaaaaatcaacataagccagagagagagaaatttaaataccttcaaatggaacccgagatccacaagccgacgcttgagggggcgaattccaccgcaaccttgcgctcgccgagaggatgaactagcacctgatgaatgagggagagagagaggggaaatgagggaataggggagaacaaaccgggaggtttgagaagcaatttgcgcagtgaaaaactgcccaaacctctccacctccccggcacaaaaaacgcagggaaaaacagccccatcactccacctctttggctcaaaaaaaccgcaatgaaaccgccacaacttaccgaaaaaaatggccgccggatttggaggagagaaaactacctccgccgcagcctacgcttcccaccgcaactgccggcgcgatgagaggaaaccgtcggctccgccgactctgccgacgccggcgcgatgggaggaaacaacagcaactccccgcaccccccccttcgccacggatttcgccggagattcacgccgcctccgccacagatttcgccggagattcacgccgcctccgccacggatttcgtcggagattcacgccgcctccgccacggatttcgccagagattcacgccacctccgcctctctcactctccgcctctctctctctctctctcgtcgagcgccacccaaaaaatttgaacagtacccttcgctcgttcggtcggaaaaggcgacgcgtgagctcgctcggtcggccggtcgggacgcgcggcgcgcgccgtgatggacgccacgtcaccacggctgccacgcgcgtcgcacgatagcgctaaatggagaggcctctccgtttagattttacgagcttagaatgaggtcaataacatagccaactatcggctgcaatagatgggcacatcatctggagttggattcagcttatctgacttcaaccctcacgatggcaaagagcagtagaggtcatccagctgtccatgttcgatcgaaccgtctgcccaggaagcgcatcaaatacaggtcagccgcatcgtgagtctgggccaaggccggcccaacaagcctcgtcccccagccgtgctcgtactcctcgtctggccaccgccatcgccgtcattcttgtcctcctcgccgccctcgctctcaccgtcgtgctcgtcctcctcaccgccctcgctctcgccgtcaggctgcggtactcggctgagaagatggggaccggaaggcgcgcaagatgcagcgcccggtcacggccacggcgcatcggtgccacgagctcgatgtgcgcgcgcggagctcgagcaggccatgcgccgcgacaggcagcgcgcggcgaatggaggaggggagtgcgcgcgccgcgtggctccatttcgccgatcagaggaagaccgaagctgtggtgcctgagctgctcgttgatctgaattacctgcgtcgggcctcggcaggcagggagaggaggaactcctcatcgccatctctcagcagtgagcgagtggaggaacacagcggcctcctcttcagctccttgatgctgcgtctaggagtgttgctttgttgcttgtctgaccaaaccgaatggcattctgaagatactgaatgttcagttataagaatgatagattgttctttacacgggcagcagaagcagaccacttgttctgaaaaatggggttgcatgtgttctgtaatttgtatagaaagcagaaaaactctataaattgtttgcaatgagaatgacttgtccaacagaatgatgaaatggccatttgtaacttatcactgcaatgaaattatgttccaattctgggcatatggcttgttcaagagaaccaacggttttttttttccaaaatgcacaaacatatatgcatgacccaacctttccatctgatttccttttgtttgagtacctttctctaacctcgaaacctttctgaccaccatagctaacccaaaacatccaagcctcatcaacagtattgaattccatgccaacttcaggtaacaaactaggtagcacacccactctacaggaacaaaaaaaatgatttggtggtcatcgaacaagtaaaatctacccgatcatggtgaaaaaagtaacaaccatagcttacagacctgttttcttccatctcaaatatgtagattttgctggaggcttctttgatgaattccaacagtctaatggaggaggtggaagacaatcaaataatttgctaaaaaaaaggaagagaagaggccagaacttcacctgtgcttgatcaatggttgaatccgtggttcgctgtcccagcatgttgtcagatgatcgcctggggccatggcctcgtttggcgccaaaaaggcgagcgcgaccgccaaaacgcgtttgttcgcggtaaaaaagataggagcgatggcgctgggacgaggcttgttgggccagccttggcccagactcacgacgcggctgacctgtatttctgggcggacggttcaatcgaacgtggacagttggatgacctcgactgctctccgccgtcatgaggggtgaagtcagatgagctgaatccctggagaaagcattatagctaagtgatacaatagatatatcatatacttactgtaacacaaatattctttttgtttttataggcccaccatccctctactctctttcttgccggaggaggagatgcgtgggaatgtgggatccttcacgtgctcaagtccaaggacgaacatcagtacatcatggccgccgcgttcatccggtccggcccgcgtgcacgtctggcgctgctgtactaggagacgacgactgtggtggacggggatggcggccgctgcaaaggcggacgagggtggtaggacgggtgtgtgtgaggacgacaggatggatgaggacgaggatggcgcggcgcagcggatgtgggcgaggacagcgggatggacgaggacgaggacagcggcccggcgcggtggatgtgggcgagaatgacaggatggacaccggtgacaacggcagccgctgaggatgaggacagcggcggccgcgcgggcgacgatggcagccacggcgtggctgatgcaggcggccgggctggacgagaaccacaacggcgacggccaccgccgccgtggacgaggtccgcagccgaggcggtcgcggtgggcaagggccactgccaaggcgagcagaggcgatggagacgacggccatggcggacgagggtggcgacaacggtagacgagggcgatggagacgccggccatggtgcacgaggtggcggcccggtggagcgcgacgacggcagatgagggcgacggagacgctggccatggtcgatgaggcggcggcccggtggagcgcgacgacggcagatgagcgtgacggcaacaacggggaacacaagcggagcgaacgcgctggtggtgataccggcggacgcgggccgagtggatggcgatgcagacgcgctggtgggccccgctgcctcgggcgagcgtgcagtcaagcgactaattaggccatccccaaccaataaactattagtttccatacttgtcatgtcatatagacactatatgtagacactatgtattcaatggatggtgtatctatctatcttctatctatctatcttctatctatctattatctattatatactaaaagtccattaaacttcctacaaacgctctaaagccgccacgtggcactcctacaaatattcctaagtcgccgcatggcactatctaatcttaccgttgattttcacttaaatttgtggacccgttattttacaccattagattagatctattattaaaaaaataataacttccacatgtttataacatacaaacgctagctgctactgtccgtatgtatgagattgtacgatacaaacgctactgatgttctttccgtaacatacaaacgtacatgattgaaaataaaatgatcaagctttcttaaccttcgctggaagaaaaaaaaaaccatacacttgtacataaaaaagacagaaacaacatacatccataaaaatcaaccgtttttaaaatatgattttctacaatataaagataaaatatattacttcacatgtataaatatatttagttaaattaagatctataataaatatccaatcaatgttctttaaaccatcttctaaatctatctattatatactaaaattacattaaactttgtacaaactcttttactctgctatgtggctctcaaataaattagagaaatcctagaaatctattatatacttaaaagtctattaaacgtactgcaaatgcttctacattgtcacgtggcgctttaataaaattacagaaatcctagaaattcagaataaaaaaagaaaagcatccaaccttcagttttcacttaaattagtggacccattattttaaacaatggattagagctcttaaaaataccatgatgctaatctctatcctggaaaaaacataatgcgcttacgtcatacgatcgtctccctcccggaaaaaaaacaaaacttaaatacctacatcatatactataaaaaaaataaagccaaaaaagaacaagaaaatatgcataggtacatagtagaatcggaaacatatactaatcaggaaaaatcatcagtgtcggcactgatttgttgtcaacagcctttaatctacgattttattaaaaataatactacacatatatgcacaattaaacttaatataaacttattatagtgataaatatatcatgacaaatgacgctaacatgtaatagttaatgcgataataatgtttcaaataatttcatatcatattttacagtgtcaaatatcacttgacaaaaatatacaacgttaattttaatctacatgtgtaaaaattaaaaaaacaaaacctatcattgttttttaagtacatctgtttaggtttatttaattttaggagagattgagattctcaaattatttcgaagttttcaaaaattttcttatttgaggtgtgagaagcacaaataatagatagatgagaaaaattaaattaaattttagccagtgataataaaaatatataatttagctttggtttttaagtagacctttttaggtttattttgggtgagattgagattctaaaagtatctgaaagtttttcaaaccttttttattgctatttgaggagtgagaagcatacaagatggatagatgtgaaaaaataaataaataagattttagacagttattttactacaatacaacccgtaattcatcacgagaattatgtatgttctttgccaaatagtattggaaaaaatgaataatccaataaaatatgcataaaactacttatgttatatttttttaattgatagaaattctaatatagcgggtataattgatggacgaatgacatataccactgaaactcagcagtaagtgcactctagcgaattagatagtgtaaataagtttgtgaaaataagtacattattacaattagtaaatgagtctcatttagttataaacaatatatggttaaaaaaatctagcgctaaagtatgaatctttatcaaaatataaataatgatatggtgttttgtagattttcatggtggtacgtctctttagctatagctctttttttctaaatagtgccgaatgattaaccccactcatttgaaaaacataatactgtttgtattgcattaaactttgagaagcacttattactaacttcatatacacattgtctattctctaccaaaaatcgactcgaaacttttaaaaaaattgtttcaatcacctcctttctgtccctctttgtcctttaatgtaaggtgcagtacttgctatgctatcgtaaatattgcatgggcatgcacattgttgagttaaggtactgtccatgaaaggtcaccatagacaatgtaactaaagtgatagacttatcaatataatcatttgtgagtgtaacaatagtaaactaagtgttaaaatagtactctacgatggttttttaggggcatggctacatcgacgtggaacctatatgtttcaaggcattacatatgaaagccttggttggcagatacatttgacttcatccgttagagaggtattcatgtttatttttaaagatgttatcgtattattctgtagatatgttatatttatactatttatacatagatgtgaaaataagtgatgaatttttataatgtaacaataatgtatcatttattttagtggtactaatatagtttcatttattaaaggtgcacctaactcttaaaacaatgatagtaagtaatgatgataaacaaccagtttatatatgactaggacaaaggaatttttatttaaattcgagggacattcttatcacattagtagtatattaaaatctatcgtctattttatggtaaatatatttatttttttactgtaggataatctaaattcccttacactatatatagtgatataatccattttagcatttttttaataaaaaataagatgcccatgcatctgtgagaaattccttaccgatttatattctggaaatgttttccaatttatattacgtcgttatagtgtttgaacacaacctatcatacatgcccgcgcgaatgtgcgggctaccttcctagtttaaattaaattctcatccagtcacatctcttctctctccttttatcagcatattctcttatttttattcttagttcttgtgtagagatggtttcttcatctttttacctctcttctcgttaactttcttgccacatactccctccgtttctaaatatttgacgccgttgaattttttacatatgtttgaccgtctgtcttatttaaaaaatttaagtaattattaatttttctcctatcatttgattcattgttaaatatacttatatgtatatatataatttcacatatttcacaaaagtttttgaataagacgaacggttaaacatatgctaaaaagtcaacggtgtcaaatatttagaaatagagggagtatgatttttgcttatgtgatgtatttaatgctatggaaactagatggcatggagggttggggatggccttagttgtccgctgctactctctcctccatatcataaaaaaaatcttacatggaccttatatcgcccattattgtacccgctcttatggagaggaatcactagacatgatactttttgacacgcgactgttgatcaaattagtgcataactaaaaaacaatcttttccgtacttatgaattgctgcacgacaacaaaaccaatgttttctataattacgaacaaaattagttactactattccttttgcaggatgattatgatttctcgatttgtcatgtaattttttaaaaaaaaaacaaatcagcacaagattgtgtccactctattactagctacctccgcaaaagaaatatatttctacgaatttcagaaagataattataccacctataatcgtatccggttttgtcagaaatacaacataactagcttcagaaaaactaaccgacgatatcccgtatgggggaagtggggacgggatacataatgaacggtcatcgtccttatccgtctgcatccttttccgcccgactcgatccccaatctcctttgtcgctcttctcttgcacctacgcctcgcatccgccgccactcttctccttcctctcctcttcttccttgcctagctagaagcttgaaaatggctagagctcctttctcctgctacacctaccctcctgttccgtccccctcaccatcaacgagccaaggagagggctgccagcaccagatctggagatatctagggcctccccgtcattggatccgcctgagccatgtcagtgatgaggtgatgatcgcaccggcccctgtggcctccacctcgatgtcatgccatcgaggaggatgccgatcgatgtgaatcctcctcccacgcaactgttagtggtgatggagaggagacaaatgaaggtgctagatttggagtttcaattgacaatcgacgtggtgttgcagacatcgtgttgctcgtcgacgttgtgcgcaggtatgtcgtgcatgtggcgtatcaccatggcttagctggtacctacaggtattaggcatggtacgaatggtatcatgttgatacctacaggtttcagggctggtacctatggtatcatggttgatacctacgggtaccagacctagtattagtggtatcatggttgatacctacaagtttcagacatggtacctttggtatcatggttgatacctacaggtttcaaggctgatacctgtggtatcatggttgatactcacaagtttcagacctggtacctttggtagcatggttaatacctacaggttttagacttggtataggtaccaaccaatatcacataggtaccaagtacaaggtataacgtgcgtcactgccgcttgggcaggtggtgagctgtcgaccaccagcgttttgtctcgtcttctcccttctattcctttccaaatctccatgccttttcttctcaatctggtgttggtacaagggtcaccaggctgctacagcctgcagggaccaactttgccacctaagccactactggtactgtggccttctcctagcgcctcgcgcgtgctcctccgccagctagggcgtgagcgcgtagggcggcgctgagtggtggactcgtgagcggataaagtggtggcggagctaacgtcatcaatataaagtatctcgtttagacgggatgccgtaccctagctagcagccctctatagctttatatggaacgaaaataccatatacctagatttatatggaagggtatatatatattcgagtatgaaatttctattggcttaaaaaaataatatgggaattctacgaataacatgtaaatgccattcaatatgtcagaatccaatcgattcgtgtaatataaggtcttatatgctcctatcccacttgtagttttcaagttctaattgaacggtcatacccgtataaatacaaagacttccattgagacatagcatcaaattataaaccatagccataagccagatcgaacaccaactagccatgaggaaacctaaagctagccgccgaggcgccgactacaagtcatcggattagtcctcattgaagactacttaggcttagattagttagcttgcttctaattttataatcggtgtgaaacatcatcgaacgatacatataaattggattagggctatttacctatcaagaggtttgaacaagctagtataaacaatatatatttccgaaaactgaaccagtatatttcttgtctccgtgtcgacgggggatactagcacactggaagaatagggtatagggtatgttggtacgaggatctacacaatacgacatcaagcaaacccggagacaaggattatactgattcagacccctcgtaaggtaatagccataatccaatctatatgagattgatatgaaagaaccacggattacaatagagaaccaacgattccgagattaccagcgagatccttgtcgagatggtttcgacgagatcttctagcgagtaggcttcacgtcctccggattgtaggctatggtggtggtgttggtgctatgattcgatgatctggaccccttaaggggtgtgtcttttataacatgaatcaccttagtctccaagtaaaactcggtgactatggaccccacacgatatagtataacctaaccctttttgagtaggactctgttgttcacttgctcgtgaggataatttccataatctcttgttaatttcctcatcgtatacggaaatatatcgtacaaacgaaggtatgtcgtatccatatattccataaatcgtaggataggagatataccttatccgtaaccatgataggctagtagcattgttttgccacgccagccacggtggcgtggcaagaggctagcatgacaggacagcactgccatgccagctgcgcgtggcatgccaaagttatttggccaagccaggcgggctggagtggccaaaaggttcagattcggacatattttttcgaaaggtctatttataaaattaaaaaaaataaaaagtctaaaaaataaaaaaatttcgcaggtaactggagcctcttatttcttaacagaaaaactctcgaacctctattctagtgtgataggtatagcagttctttcactagatgctaccttgagacaatctcaccagaataagttgattgaacaggtttctgggtactgcaacagtgttttaggaaaacaaattcagccacactccatatattcattgaaatatctcaatacaaattccacccccgggaacttgggccagccagcaggttctaggttccatagattacatagaaccagtgttcacctagtcgctaaacgctagtcggacggtcacctactgactagcgactaggctgattaggcggcgactagatggattaggcgaattaggcgttttttatatttctttcacagaaaaatactgattcttgacattcggtactcagtaaatataggcatttagacaaatagcattgggtttagtacaaattcataggaatagcgaacatacattagtatatatatatagcatagcaggctaggggagtagcagtacagcatcaacaccaacaaatcacatacatacagatctaaggagctggagctaggagagaggaagaaaaatttatctggaactggaagaacagaagagatgaggtggtggaggggagcctgatcccctgatggcctgatctagggttggcgcaggctgcttgagtggttccgtgcttgactgcttcaattggtgtgtttgccaccttccattgacggtaaggatgaaggatgagagggagagcagtagtagcagaggaggagggggaagaacgtggagcagcagaggaggagatcgggaagaacgcagcggcacggtggaagatcgatgggcacggtggcggagccgtcgctcgtggcggcgtgaaaaaggggagtaggtaggggttgcgctctctctctaggctctcaaataaggtaacctaaatccccttctataccgagctggtcccgcgcggcgtttctaaatttaattgtgcccaaattttgatttctatcacctagtcgccgcctagacacactgtcccattgtccaattgcgcccaggcaccgtcctgtccaagctgtccaggccgcctaggaccgactaggaccgtctaggcggtaaaacgactaattcactgcctagggtataaactggacaaattgtcgccgactagcgattaatcaccgtctagacgggctaggcggctgtttaggcgaacactgcatagaacagaacttatcacacagcagagatcaaaaactcaggttgtcccatcaacatagcaacatgtttgagaattcaagcatggtaattcagagcattgttccagatccaacgcccagcagcaaagcaacacttcgtacatcttcttggtcctttattctcacaaaaaaatgtttcccatttcatcacccatattaccatataaaatgcctataaaatatgtcagacagccaaaaaaaatcgatactcatgtgagaagctccacaacaaccacctctgatgcagaacaaacatcggagcggaggtactcatgtgagaagctcccatccagcaggtaccatcgatactgtccggtatgaaatctgagccatccaatcagctcaatcggatggtggaaaatctgtggtacctccaggtacaaatttgcccatgaggtggtaccggaatatttggagtggtggaagggtaattttgtcttttcgcgtagaagtgtccaggggagggaaatagggtcttctaccaaatcggcggcgagcaaatatccccttcccatccgatccgatccgatccgtgagagtaggcggcgtcggcgacttgcttcgtcggcctggagttgctccgcgggaggcggcgggatccgtgggaggcggcggcgacttgcttcgtgggagatggcggcggcgtcggcgagttgcttccgtcggcgcctacttgctttgtgggaggaggcggcgtcggctgatccgtagccgccggcggcggctgatccgtttgaggcggcggcgaggtgctccgtgggaggcgaggcggcggcgggggaggcgaggcgacggcggcggctgatgtgtaggaggcggccggcggcgaagtgctccgtgggaggcggaggcggcggcggcagcgggttgttcgtggcagcgaggttgtggcgggcgcagtggtgcctggcgcggcgaagccctggtgctgcggtgctgctggtggcgggcgcggcggtggcctggtggcggccgcgttcacgaggtggcggcggcggctggtgcgtgggcagccttggctgcgaggtcgtggcgtgcgcgatggtgccggccgcggtgacgaggtggtcgtcgcaaccggtgttgtggcggcagcgggtttgggctttgcgcggctgcagtggcgaggtggtcgtgtagtcttcttagccggcgacgaggcagtgtatgcatcgattttttttcatccaatctaaatcattagcttctgttggttgcagcggtagatactttcattttctgggctgcatatgctcttcttcttcattgcttataggatttgtattgtacgatttattggatgttttaatgagctcagtcgttgcttgttctatgtgaattttcaaatgttcaataacctcccctatcaatgagtgactgcaaaatgataataggatagaagaaagaaattgttgatagcataacgagtggtacactgatgagttgcttgttttaacaaattgttttcccagcatacttctatggtttattcagggaacagaaactaacctatcaggctatcacaggtggtagccagcctaataaattcttctctgaatctagtttttcaaatccaaaagatataacacaagacatgtagaatctggaggtcgacatatcatttctgacaatgaaaataaaagatgaaaccaccttatccacatcctatacacacactttagatagaaattctgtcatgggtatttcatcgaacaccttttatgcgaaataaatacctaatgcttatcagagacatcctctgttacctctgtaaattgcaacatcacataatcacgcacagaagattcaaattttgtgaaaatcttactgacttttgctagataagaaatgccatcgaattcccttaacttggataaacaggagaatagcatatgcataaaaattctgtgatgttctctaaacaggagaaacattgcaagtagttacaatgatgtctatctgaatcttagcctagagctagttgccttcatttgcctcggtcactaggcgtttaatatcttgctgcacttcaatcacttcgttcatagtagaattaatgaggttggctgcaaccttatgtttgaaagtggtggttgtatcctgaaaagcaagttatgaaaaaaatatcaagtaatgtcattttatttacaaagagtactgattgcaatttaaaattaccatttcattgaactcaggggagagttcttttccattccaatgctgtatgaatttcaatgtgtgcaagccacatgaccagctgttgcaagcatgtcctttgttagtggtaattcgttatagataatttgcgacaaaaattaactgtttgtttgacctgtcactttgctgagggactttcattgggcagaatggccaattggtaatcttggtgttcttccatttgttttcaacttcatcttctagccttgcatactggataaacttttcaattccttttatctgagttatcaaatagagtattacatatctaatgtaacaagttagtaaggaatagtgatgaatctaaaggcacaatgtagcatactgtattattgaggtctttatctttgtcgtagtagctcttgtccatgcgcatcgagtctagtatttgaattttttctttagcaccattgagaacagccacgtaccaatgagttgagtttctattgagtggtaggaaaatctacatagaaaatgaaatgtaagtcatgcagttattattatgaaggatatttgaggacataatataccatatcatgttgcaaatattttgctgtaacttttgctctcttgtcttgatattgcttgttgcgggttccaatttgttcaccatttgttttccaggcctggcaatgtgctgtactttctagaaatgcagtaccattctctcttggactttcacattgcatgtctttaatcaacataatgtatgcatctatgacctgtgaaagaataaagaacaaaatttagatactgataatattatgttgtatggaaatggctgaccggctttcagacatggaattttcattcaagaagaagttgtccaagcagaaaaaagagactgatgacattagaaattggttcgtaggaacagtagttgtagctgtgttccttctcatgaagttatttgataatatgtactatgcttgccgttgttgattttctacatgtcagttagctatgttaaggtaacagactttttagtttgtcatctcatttgtaataaacgaatatcaggcccttgattgccctctaaattgattagctgtgcattgttcattttggttgataagtattggatggatggttgctgcaaaactggaaaactggaatgagatactgtgtaataaacgaatatcaggccctttattgccgtccaaaattttcagatgtgcattgttcattttggttgatgagtaatggaaggatggttgttgcaaaactggaatgagatactgaaagaagtgtactacaaaactgtaaaacttaggtgtactgaatcattttgtacatttttaaggtgtacttagccttgttgtgctactgaaatgacatgtattactggaataagtattactggaaaactggaatgagtgctctcttttgatcactccacagaatggcatgtatttcacaggagttcgagtaaaaacagcacaatggtgctagtagacaaacaataaacaatgtatgctctgttcacagctgacagtaattaagacaaaagctccattcaatgatatacatgctttgttctccagcaaaagcttgtgcttttcacacaaattcattacaagaaccatgacagattgaattgttcattaaaaaaaactagaccacacaatataatcctctgtccaacaatacaacttcccaaacaaggcagattcaacttccaccagtgcaaagaaacacttcaaactccagattcaacttccaccagtgcaaagaaacacttcatacttctcatacatcttcttctactttgctgaaaataaaatcacagatcaaattagtaatatatagagagagtttacataaattgacatattcaaaataatcatattatatttcaccttaggaaaattggacaggttcgaacagtgtgcccatggccacgacaataaccacaacgcctaacacgcttctccatgaatcctcgtagtcttttttgttggagctcctttaggcacaatttccataggatcatggaccttatcatgactctcaatgtctgtacgtgaactttgagctagcacatgaccacataaagtcaaatctgagttgtttgtctcacattcatcagtttctaagtctaatttttctagcatctccatcaccattaaagtagtttccttagacaccgaacacttgaaaaacacttctgtgcccatgctacgcagcctgcgatatctctccatctggtctgaccatgtatatacttcgccatacctatcagaaggaaacatgtgtttcgctttaattgtccacctacgcactatgcatgcttcaggaatggcatcgagcttcaaatgatgcataattgcaaccatatgctcacatgggaggcattcacgatccatttttctgcatgtgcaatttatgctcttcattgttgattccatatatgtacaattcaagatttgtagcatctcagaatcacctttcatggaaataacatacttaaccaagttgtcctcttctacacaatctatcacctcccaatccatcgacttagcaataaccaacttcaacttcttaaaaactgcaggtgcaaatatacgggcagcatctttctcagtaagactagcatcattagaagtgaaagggattgattgtgaagctttacaatctagatcagcctccctatacctcatacgtgataagcaatgctcataatactctaccaaaaggacaaggctcattttacgatccaaatacctatgaagtttagaattcagactttcactacgttggttgcttttcatcccaagaaaaaacaaacctttagtgtacgcagtagcccatttcttcctcaaattgtacatcctcgcaagccattggttgtcttcacaacctttatgcttcaccttaaactcgacccactttctctcaaactcttcatgatcatatggtgcgtggacaagtgctcgaaaatctgaaagcatatcaggacgaagatgtcttgccatgttctgctcaatgtgccaagtgcacaaccgatgctcagaatccggcatcacagctgctattgctctatgcatggcattgtccccatctgtgatcaatcctctaggatgcttctgatacatgcaatctagaaactgcttaagaatccattcataagttgcaaccttctcatcagctacgatagcacatccaaaaataacagtggaaccatggtggttcacaccaacgaataggataaaaggtaagttatacctattcacccggtatgtgctatcaaaaactacaacatccccaaatgcatcataatcgatacgggattgagggtctgaccaaaataaccgtttcaaacgaccagcttcatccgtctcatactcaaaaaagaactccatgtcatgtttttgcctccattgaaaatactttataacacgctctgcatcaccacctaaaatatgtttcttccttagcctagtaaaataattgtacaggtccctactaacaaaacctgtagcatcaaaaccactatgatgcctctccatgacatccataacttgatgctgacgcaaacccacttctttcaattccaaaatattagccttttgagcattgctaattgtgcgatgtgaccgtaagaaagctacttcatctgatttagccaacggatgattatgctttgctacatacttcacaacaaaccaatcacctttcttcttgtcaagtttaatctcaaaaagtgcattgcaaccacatctagtaagagcttttggttctctacttctgttagccgcttccatatacacttctttcctatgtccttctctagagcattggtactgcctatgggttaccgcagcagtaataggatcacgtctaatgtaattcttccttacactaaaccctttttctttggcatacctgttatagaagaggaaaccttctttctctgtcttaaatctcatggcagtcattgttctgtactcctcttgttcttctaagcttataaaattgtctcccatttcatcacccatacaagttctgtaaaaagaaaacacataatactcagaaatcatctaaaatcaacaaacaaactgctacctatctcttggttccaaccaaaaaaaaattataccacaagaaaatcacatacctgagaggaaaccctaaaccggtagggggcatatgctgcttgagctgtccagggggataggggcaaaaaatacccacggcaccgtcgctccttgcgcagatggatgggcactggatgagataagaaatcggcagcggtgggggcgtgaatgaagccgctggtgaaggagcgctggttcccccgccgcgggcggcaaatgcggggcgagcaagcgagcgcacaggcgggggcgtggatgcggggcgggcagatttggggcgagcctgcgcgcggctcaggcgggcttcgcacgggcggggctgcgctcgccgaggggaggaaagaaaagagattaggtgagaaagcggcgccgcacggagggaggaaacgagaaagagcgaagaggagaagagggggcgcgactactttctctgttttccaatcgtacccttctaacatggacggatggatttatctctgtacctcccagtaccagtacctaccggtacaagttgctggatgggagcaacgctcaagcagtcgaatacatgaatcatccaacttggaccagctccaaaaatgtattgcacaaagactgaaatccaaaagatttttactcgtcttggatgatatttggaaatgcagcagtgaagatgagtggaaatgcctactatcaccattcacaaagggggaggccagaggcagcgtggttcttgtcacaacccggtttccatatatagcacaaatggtgaagacaactaatctgatagaactgcaaggtctagaacacaatgagttcttcgcattctttgaagcatgtatatttgctgattgcaaacctgagatttatgttgacgacttaattgatattgcaaaagaaatttctatgaaattgaagggtttcccactagcagcgaaaacagttggccggctattgaaaaagaacctttccaggaatgttggatagaagttcttgaaaggaatgagtagaaaaatatgcaaaatggcgatgggatgatgcctgcactaaaaattagctatgattaccttcctttctatctaaaaaagtgtttttcatactgttccctttaccctgagaactaccagtttaataatttagaaattacttttttctgggaagcaataggcatcataaattctagtgatcataataaagctgaggatataggattaagttatctggacgaactagtaggtaatggctttttagtgaaggttagtgatgataagaggcaatattatatcatgcacgatttattacatgagttagcacaaaatgtttcctcacatgagtgtgtcagtatacggtcatatagctttaggtcaaataatgtcccacaatctgttcgccatatatccatcaccttacaagataaatatgacaatgattttgagggtgaaatggaaaaattcaagagaaaaatagatataggaaatatacggactttgatgtattttggagaatacaataaagatatgactatatttttcaaaaatatattcaaagaaacaaagtgcattcgtgttctatatatgtttgcaaactcccttgaatcattcccatacaacttctcaaaattactccaccttcgctacttaaaacttgaattaccatatgactcggaattttctttaccaagtgcaatgtgcagattttatcacttaaaattcttggacctagggtatagtaagtgtattttgccacaagacatttcttgcctagtcaatttgcgccatttaatttctaaaatggagctatgttccaatattcctgggattggaaagatgaagtatttacagtggctggaagagtaccatgttaagaaagaggacattggatttgaactgagtgagttggggaatttgacagagcttggaggagagctaaagatatttaaccttgaaaatgtggcaacaagagaagaagcaaatgatgctaaattgatatcgaaaaggaatctgaaagcattgacactagtttggagtgcaaagcaactctccataggatctggcgttcttgatggtctgcaaccacatcctaatcttagagcacttgacatacgaaaccatggtggttccactggacctacttggttgtgtggtgatgtttgtgtcaaaggcttgaaatctctccatctagaaggcttatcttggggaactttcccacctttcgggcaactaatgcatctggaggaacttactttgatcaatattgctggcatacgtaagtttggacctgattttggtggtgttacccaaaagagttttttacacttgaagaaaattaaatttgttggcatgccagaacttgtggagtgggttgggggagctcattggcatttgttttcaaagcttgcaagcatcagatgtgaagattgtcccaatttctcggtgctactgttgccattctctaagtgctctgtcatttgcacacaagacataaacacagtatggttcccaaacctgtgttctcttgagattcgaaattgctccaagttgtcattgccacccatgcctcacaataccatgctaacacgtgttactgtgaaagaagataatcaagcaaagctgcattttgaagaagagacactgagaatagatggttatgggggtgctttggctttccataacctggacaaagtaaaagatatgacaattgaaaacatgttccacatttcattgactgatctccaaaagctgaattcattaacaagccttgatgtcacaggatgcaaaagcatgttatccagtgaagtagacaatggttttatcttttgttcagttcagcaactcaatctcagagattgtcatcttaccgaaaaatcattgggtaagttattaaattgtttcccagctcttacccatttcttcttgagcatgtttcctgaatctgaagaggaagaggaagtagtactgcgattcctatcgcccagctcattgcacgttgcctcaatctcaaatcacaggaatctggttcttccagtggaggatgtggatggaggctgtctccaacatctctcctcactcgaaacactcgagatcgatggatgtggcaacatgttttctcagtggtccatggtagaggcaggagctcagaccaggaagcccttccctacttccctcaaggaactcagtattgtgggagagtcaagcatgcaatcgatggctccactctcaaacctcacatccctcaccagtttaacactaaagcactgtgttaacttaaccgtggatgggttcaatcctttcatcacatacagccaatactcttataaatagagaatttttacggcaataataatcatcgctgctccatagcaacggatatgttctcagaggtggcaaggaccaaagttatgcctgcaggtggctccttccaacagctggtacgacttgatgtggacagtatctcagcagtgtttgttgaaaccatttgtagcctcctcgctgcgaccctcatcgagttgagattcacgtctgacttgattacagaaagcttcacagaaaagcaggagcaggtacttcagctccttgcctccctccaatacctagaattctatgggtgttctcgcctaaagtccctccctaaagggttgcatcgcttttcttctctctatggactagacatctctcgatgtcctcaaaaagaatgttgccaaaggagggcttccccgcttcactgcaagatctaagtatggaggcatgcagcatcaatctaatggatcaagtcaaaaaattagaagcatcaaacccacatttaaaagtacatgatacatcagtgacttatatcgtgaggttagttcatcgaaaaccaacttattaccctcaatttttgtgattttttctgcactaggcagtaggtactagctagcaaccactgtggctttcagcccctatagtccatagagttcctttatctgttatctaaccaatgttacattagttgtacaattatggtagtttactacttcctctgctattacacttttttttcttgaaacagaaaggtgagagcaagatgtctcaggggcagaggcacattgacccagtatggtccactgggcacaatgtaaatttgcttctcccctgttgtcagagccatgtggatacatgatttgcattaccagtgggatctcaactcctaagccgaactgtcagcaagcccaagataaactctttatcttgatcagatcctttaaaccgaaggtactttcaatttcttccaagtatttcactttatcttcggtgtaatcacaattttctgtcctgaggacttgattgattgccccccccccccctcccaactgcccaagtggcaccgcacacccacccaaagtatataatagtgtcaatatagttggtatatgtcagggaatacaaggcagcgaattgaaagattaaatgtactccctcattttcatattataagtcgttttgactttttcttagtcaaacttcttttagtttgatcaaatttatagaaaaacatagtatcattttcaacacaaaacaaacatatcatcaacatatattcaaagtaagatttagcgaccccgcaaaaaaaagtaagatttagcgaaaccgatttgatgttttagacattgcttttttttaataagttttatcaaatttaaaaagtttaactatgaaaaaagtcaaaataatttatcatataaaagggatgtctactttttcttagatggttaatgaaataaccctcgtggttagatattgtgttttgatgctgatggtgctcattttatatgtgttttatttttcgggaatacatttttatgtgtgtttcgtactcctactttcaataatgcacttgcgatagcgatacaattatcttgttttgttgagcattaatgtaacatttacaaatgaatggttccttttgtactagattcaccctggcgagcctttttcagccatgtagtacggcaaatgtctgacgacataatataactcctcaaaataacgttaaattaatttgggacttgcttttgcatttgcttcctcaaatcaaattgtttccgtgagttcaacctggagattctgcagaacagttattacagtccaatgcattgttttttccaggtggtttccaagacaaattggtgttccatcggacgagtaatgcagccgccatctgtcgttatatcttgacagagccgagaaggaaaatcctccagagattaggcaccatttgcatggtcagttgattctccattagtccattaccctacccttgctgctcctatagaagctcagaagcgcttgttttgcgatgaaccacttacactgtatctgttcatcattgcaggcttgcagcaaccggatggcgagcaaggttacagagacggcgccgggggccctctccaatgggctgtggcttgcctgggccgaatgcgctcaaacaaatcagcccatgtgtgtgtttggggtggcccaggggccagccagactcttgggcttctcctctctctactccaccacgcattgcaagcagagaggcgcgaggtctcttcttcctccacgcatgacgcctccggatgagtagcgaactaacgatcgcatcctgcacgcatctcacaagggacgccgcgtcgacgccgatgccatccgccgtcacgatccgcagaagcatgcatctgctcaggcgcctcgcgctccctctggcgcgggatgatacgcttttagatcattggatggcagcgggtttgttcgatcgagggataggtttttgcttctctcgaggctcgagctatctccctctgcaacccttctcgctttgttcgacggataagttttagctgtgattggtggtgttggcgtgggtcgttcagtggtgggttcatgtctaggcttagcgctctctgatcttgcttagcggtggttggtgcagcgttaattttcttttattgttatatctatctatctatctatctatctatctatctatctattatatactaaaagtctattaaatttcctataaacgctcctaaaacgccacatagcacccctaaaaacactcctaagtcgccacgtggcgctctaataaattttagaatccgatggacccgttagttctaaccattaaatctattataaaaatacaattaaatttatctaaaaactcttattgtacgtgcacatataggtattccaaaaaaaacaaaaagtacgtccatattttgatacgtacgtacgacgttgggcccacatcattcttttttttctatctcacttattatggaaaaccaaactgtctatatttactatgcaaaatatatgttatttagagtttctaattaggcgcatttcatggaaacatccatgaaaaatataaataaaataaaaaatagattatatgatagctaaattaggctttcatttctaaaataaaaacaactctaattgtgactaacaattctaaaaaattttccactccctaggtaaaatataataatatgtcaaaatgatattactaaattatcatgaacgtattttcaggtattatatgttttctctattctataatatttgaaaaattaaagatcttatatattcttttgacaccatgtcgatgtcttctatctccaacttaattagactttgatctagctcaatagctgagcttatcttggacacacgaaacgacacatgtcattagtgcaagattaattaaatattaaatattatgaagccaaaaatagatttagcttttatatagaatatatttctaataatacacacgtttcacttaaatatatacaatgtagtccatgattatcaatttatttataaggaatataatggtttagatggacttagatattgttatcaaaaggtattaatttcttttataaaaattcctagaacaatcgaggaaacgtgctcataataaataagagagtagccaatccgataagtactttacaacttattgcatacatattaaaacccttaatatgtagtatataatatactttataaatacaaaatagtctaatacaatcgtatattcccactaatcataagtatataagttctgtattagtgggaatattgcttacgaggcattcgtgcacagtgcacctaataattagctgatatccaataagcacatgtgtcatcaagcactgaagataggactatactaagtgggcaacttcaacaaatgataggtaagaagagtatgccactaaaccacaacaaacaatagttgacagtgagtaggttgccagtgtgagtaataacatttctacactcctacaagcactcttaagatgccacgtgacaactctaataaattagaaaaaaaataagaaaaattataagaaaacaaaatatttggccattgatatacacgtagctccattattttcaaccattacattagatctattccaactaaaaaccatttaatcccttcgtatgtacgtatgtacacaagatatgtaaaaaagaataaaaaagaagagttcatatacgatctgctctatctgatagtttttttttctttaatttgaggcactaaagtttttttctcaaattgtgcatatatgatatatgtaatgacactcatggcaatcttctcgaagaagtcgtgtcgctgtggcaccgcttcatgccatcccaccaaactttttgaaagtattttttttactaaccatgtaaaaggcaatcgtaagcgctcatataaatgtgtgcacaccatcctatgaatacacatactactattcacaaaaagaaaatatacatacttagaataaaaaaatgtcacatggaaacatattatatccttatgtaattatgccattctcatataaaaagtgttaacaaaattagcacaaataattttgacaatggattattccttcgtatattacccatgaacatgcgcaggtgacttagatgtatagtaaaagaaaaaaacaaaactcatattaactcgtatgtttgtgaaagatggtgatagacgagtttacgtataaccaggataaagtgaatttgtttgaatataatagacattgtcatttagtatataaaattttatggtttatttcatggtgtaagtatttctttcttttatgattataatgtaatttatagttattacagttgaatatggtgagatacgattttttatattcttttttataaacaacaaataaattacccatgcatcggcacgggtttccttgctagttatatactaaaagtccattaaacttcctacaaacgctctcaatccgccacgtgtcactcctacaaacactcctagaccgccacatggcactatataatctcaccgtcgattttcacttaaattggtggatccgatattttagaccattggattagatctattattatttaagaaagtaatcccttcctctactgtgggccagaaaaagaaaaaaaaattatgaaaaaaaacgtccgtacttacgtgtggcttcgtataaccgtgggccggaaaaagaaaaaaacataagaaagtagtacgctcttcctgtctcttcctcttcctattcttttatatctccatctctttcttatcctaattattttatattatcaaattaaaaacaagttaagttgaccataatttaaatgtacatagctaatttatattctattaaaacattgctctatttataactaaattgacaattttacatccaatgttttgctatatataagcaatatgttattgtggtatagactgtgcattttgcaagtttgcatgccatctaaataaattaaatacttattaacaacatataatatatctatatatctatctatctattattatatactaaaagtcgattaaacttcctataaacactcttaagttgccacatgagactcttataaacactcctaagccaccacgtggcactccaataaattagaaaaaatatataacttgaactggtgggccaattggatttatctcataaaaaaatcattcctcaactactaccgtacgttctcatctccttcccctcaatcctttctcctcatccctttcttttttttctctatggtagttaagatttttgttttattacttaataattaatttcttcacttctatctcacgagaatggccgtggattcttgattgcatgtcccatgcctaaatatataaatgattaatgatctgatgcatgcttttataaataataaatctatttttaaccaacaatttagaaaaaagataatagttacatagcaaaataatcataattttaaaaagttactccctctatttcatattataagccattttaacttttttcttaattaaatttctttagatttgaccaaatatataaaaatatttaacaacatctatcacacaaaattgttttgttagatataacgttccatatatatccataatatatttttttttgaaaattttactatattttctataaacttggtcaaacttaaaaattcactgaaaaaagtcaaaatgacttataatatgaaacggaggttagtttgtttgaacggttgtttcataattagacagctaaataatttaaaatcaatattaccaatatttcactataaaaaataaaatatgttatttgaatttccacctattctttacctgacaacccaaataacatcctatttttaatttatttgaattgttgatttatgttactcatattttactatgaaaaatttaaaatacgtaatttgaacatagaccaacaagcaaacaacactgaaacattaaaaaattgacaatatatattatgtcatcttaatcattctacataataaaaattagaaaaatacaaagtcaccatgtatgaccttttagagacatgttaaattaccaagtgtcacatttaaaaaattagtaaaatcttatatattaaaagaaaaaaataaaacatctagctaacggttttcacctagatcgataacctattaacattattttcaactatataatctacttttagaaaaatatatcttaataagtggcatgtcacatcttttaaaaaaaaaacttgcaaatcttaggaaaattacatctaataattggctttcacttaatcacttagaaaaattacaaaaaaaatcccctccacacgcgcccatcactacacacccgctccttcccctctctggctcaagctctacacttttcattcctcttacgttcctatttaactaaaatataaataatctataattataagtttcacgtctaatttctaatctaactattgctctgtttataatcaaaccaatgatataagattcatatgcctatagtttactatataacaaatacgacattttaacacaatcggcctattacttacgagtatctcaaatgcaacctacgatatatgccggcgcgaatgcgcgggctaccttcctagttatatactaaaagtccattaaactttctacaaacgctctaaagccgccacgtggcactcctacaaacactcctaagtcgccacatggcactatctaatcttaccgttgattttcacttaaattggtggacccgttattttacaccattagattagatctattattaaaaaaataataacttccacatgtttataacatacaaacgctactgatgttctttccgtaacatacaaacgtacatgattgaaaataaaatgatcaagctttcttaaccttcgctggaagaaaaaaaaccatacacttggacataaaaaagacagaaacaacatacatccataaaaatcaaccgtttttaaaatatgattttctacaatataaagataaaatatattacttcacatgtataaatatatttagttaaattaagatctataataaatatccaatcaatgttctttaaaccatcttctaaatctatctattatatactaaaattacattaaactttgtacaaactcttttactctgctacgtggctctcaaataaattagagaaatcctagaaatctattatatacttaaaagtctattaaacgtattgcaaatgcttccacattgtcacgtggcgctttaataaaattacagaaatcctagaaattcagaataaaaaaagaaaagcatccaaccttcagttttcacttaaattagtggacccattattttaaacaatggattagagctcttaaaaatacgatgatgctaatctctatcccggaaaaaacataatgcgcttacgtcatacgatcatctccctcccggaaaaaaaacaaaacttaaatacctacatcatatactataagaaaaataaagccaaaacagaacaagaaaacatgcataggtacatagtaaaatcggaaatatatactaatcaggaaaaatcatcagtgtcggcactgatttgttgtcaacagcctttaatctacgattttattaaaaataatactacacatatatgcacaattaaacttaatataaacttattatagtgataaatatatcatgacaaatgacggtaacatgtaatagttaatgcgataataatgtttcaaataatttcacatcatattttacagtgtcaaatatcacttgacaaaaatatacaacatcaattttaatctacatgtgtaaaaattaaaaaaacaaaacctatcattgttttttaagtacatctgtttaggtttatttaattttaggagagattgagattctcaaagtatttggaagttttcaaaaattttcttatttgaggtgtgagaagcacaaataatagatagatgagaaaaattaaattaaattttagccagtgataataaaaaaatataatttagctttggtttttaagtagacctttttaggtttattttgggtgagattgagattctaaaagtatctgaaagtttttcaaaccttttttattgctatttgaggagtgagaagcatataagatggatagatgtgaaaaaataaataaataagattttagacagttattttgctacaatacaacccgtaattcatcacgagaattatgtatgttctttgccaaatagtattggaaaaaatgaataatccaataaaacatgcataaaactacttatgttatattttttaattgatagaaattctaatatagcgggtataattgatggacgaatgtcatacaccactgaaactcagcagtaattgcactctagtgaattagatagtgtaaataagtttgtgaaaataagtacattattacaattagtaaatgagtctcatttagttataaacaatatatggttaaaaaaaatctagcgctaaagtatgaatctttatcaaaatataaataatgatatggtgttttgtagattttcatggtggtacatctctttagctatagcttttttttctaagtagtgccgaatgattaaccccactcatttgaaaaacataatactgtttgtattgcattaaaatttgagaagcacttattactaacttcatatacacattgtctattctctaccacaaatcgactcgaaactttaaaaaaaattgtttcaatcacctccttcttctttctgtccctctttgtcctttaatgcaaggtgcagtacttgctatgctatcgtaaatattgcatgggcatgcacattgttgagttaaggtactgtccatgaaaggtcaccatagacaatgtaactaaagtgatagacttatcaatataatcatttgtgagtgtaccaatagtaaactaagtgttaaaatagtactctacgatggtattttaggggcatggctacatcgatgcggaacctatatgtttcaaggcattacatatgaaagtcttggttggcagatacatttgacttcatccgttagagaggtattcatgtttatttttaaagatgttatcgtattattcggtagatatgttatatttagactatttatacatagatgtgaaaataagtgatgaatttttataatgtaacaataatgtatcatttattttagtggtactaatatagtttcatttattaaaagtgcacctaactcttaaaacaatgatagtaagtaatgatgataaacaaccagtttatatatgaccaggacaaaggaatttttatttaaattcgagggacattcttatcacattagtagtatatcaaaatctatcgtctattttatggtaaatatatttctttttttattgtaggataatctaaattcccttacactatatatagtgatataatccattttagcatttttttaataaaaaataagatgcccatgcatctgtgcgaaattccttaccgatttatattctggaaatgttctccaatttatattacgtcgttatagtgtttgaacacaacctatgatacatgcccgcgcgaatgcgcaggttaccttcctagttaatatgaaacatcgtactaactttgtagttttgtttattttaaaagatgtccaaacatgagtagggatggaggcatggagctactattgagagggggtgtctgattaagaaattttttaagctatattagttaatctattttgactatatatgtatctttctcaatgtaaatttaagaacctgtatcaatttaaatttggataaaaaaagagtaagggaagcatgtgacacccccttttcattttgctataactctgccctgaacatgaaagaaacggtgcggaaagagagataatttgcgtcctagagtatccgaaagctttagacactagattagtatgcatgcataggttcgtacctacagttcctaatctcttatcaatgttgacaacctttattggtgatcgctatgtaattcatatcatcatatgtggtggactacttcctcagtcccattttaagtgtagccaactcacatgccattaaggacccttgatgctgtactcttaatgtaacaatgattatcatgctaggctagtgtaccaataattgcagagcaatgcaaatcatttacacttaccacttgtgcaattgccatcgtatgagcaggattgcaagagacgactgacttgcagcctttcttgactactttactttgtttgcattttattagtttatttaaaaggcctgatcacggattagtggttagtatgtgaaaactcatctgtatcgagcgagcagccatcaccgatggggtcatctttgttggacctaaataaaaacttgttactgataaggttttacctagtgcgcgaggcatcctataatccatcacgatgactcattcgtgacgggctccaactcttactcataaaaggtgactttgtcatccgactgagtcttgctctccattcttggtccaacatgtgttgttgtccttcatgaatcctcgacatattagatgagggtgtatatctactcttccgacaaacatcttctcatttttttcaatctacacatgaacaagtcatagatcgtattatgtacacgtcaaaaatatcaatgacatagatggccccgttgactgttacaatggtactgacaaaccatgccttactagtctagactctagagcccacatgttgttatagatctaatttccgaccaaagatgataccaaaatatgaagcaactaaaccctacaatgacatagatggcccgttgagaatttgcttttcaatggagtagccatgtcattgtccagcaaaatcaagacaattatagagaaggtagtaggtgcgcgtgttgtctctgtctccaactttgccccaaatagacattggcaatagtattagtagtaagctttacttgactccaaatgacatgacttattttgttcttcccatagttggatgatatacggaaattcaatagcgacagtggctcgaagtagatcagcttcattcatacaaaggggtaaacgatgggcaactcaatctcccatctatatcacgtactagtacacatcctggcagaataactgctaggtttttcgatcataattttgatcatcgtggtttaatggtttaaatcttttttctgttcttttattaatgtgagaatttctagtcttcatagtataaatatggtggcttctttttaagatattttaataatataatgatccctataataaatagatagattggtagaaccaccgatttttttacatctaaacacatgcagtccaataattacatatgtgagcacgcattgtttggaatctatctattatatactaaaagtccatgaaactttctaaaaacactctcaaatcgccatgtggcttccttaaaacgctcctaaatcgccacgtgacattataataaatagagaaaattcgaaccattgattttcacttaaaataggtggacccattattttgagccattagatttaagctaatccgtatcctctcatctccgaacgccgcgtacctcctccccgcacgcaagacgtagatagctaggtacgcatctactcctctccatctccccttttttctccaaggttgttaagctacaaagcataatttgttacaataagttagagatatggagcctgcaggagctcgctgtgcaccatgcatgctacctaaattataggagtgatcacagtgatacacttgaactacacattcagtttattatacacttgaactactgttttttaatcaaatcaacggtttaagactcatattagttagctatattttggtggtaaagaattattacatgttggtctttttcaatttatcacatgcacgtatcattttcatgagtcctccccaaaattgaaggaaaccctaagaatttccttcaatatcaagtctaattttttattcaaatcggtggatcaattatgatacaataaggcaatagtaactaattaactacatacgtactctctcctcctcctctcctttctcattcaattcttcattcttctaatttttaactaattagcaacttaatataaaaacaaaaaataattagaaagctaaatgattataattcttaagttatatatggtttttatgttcaacaatataaaagtaaaatatattacttcacaaatataaatatatttagtaaaattaagatctatatatgataaatatccaatcaatgttctttaaaacatcttctaaataattcaagatctatattacccaatttcactgtaaataatacgtcatttgtagacacctatgcgtgtcaaccaaataaaaaaaatcaaacaaactatatcaccttaaatcatcgtacattctcaatagagcacttacatgtcacgtgttatgtcttaaattaaaaacaaaatcttagaaattatagaaaaacacatttgaccaccggttatgaattaaatatgtatatccattattttaaaccattagatctattttttttaaaaaaatcttaagccgctaggtgttacattttaataattaaaaaatattattcgaaattttaggaacaaaacaataaatcatcggtttttatttaaatcatttataaaaactaggaaataaaccccgcccccaccccccaaactttaccccctcctcacatatgcacaaacacaacactacccgtcccctcatcccccggctcgcactttcccctataccctccttgatatttttataaccaataaaaagagaaataatcaataatattaaagcatacatatcttttgagccacacatctgattctaatataaattgctctatttataattaaaccaacaatttaaagatccataacgcctatattttaaacttaatttttcactaaaattagaacaattatacatgttcctattttttaagtgcttagatattattgactttcatgacattatgagttcctctgcacattattgtatatatataagccacacaatgtttgcggtttatagttggttgagaagttacatttgtaattactaaaatgttcagactcatattgactaggtattttcttttttttaaaaaaagaaagatactatagatcacacatatattagggaagggagatctacgatatatctttagaaatttatatataaatatataacaaattgcgtcaataaaatatattcattaaaaaataaaatatattcattttcaataatagttatttaggatttgctaaaaaaaagaaagaccctaaacattttattaaacaagacaaaacatcacatgtttccaaacaaattaaatctaactcctttctagataacgaagagatcatagataattgtttatatgaatgtattaaatattatgtattttaaaagctaacaaatagattggaaaaattatctaagcaacactgatgagataagttatggataaacagtacttatgaaatgacaagtgtcatctggctgatattctgccatcttatatatttttttcaaacataatttatagtgcatgcccgcgcgatgcgcgggctaccttcctagttctaattctaacaaaccttcgcacaagtacttgaccactgtcaatatcgggtcgaccaagaggacctaacgaagtagtatatgggggttttgcggtcttgtttctagcactaacatgcgagcagcccaatagtattaatcctcttctttttcttcaactaatagcaatagttttggtctcatagctcacattgtattgtagagcatatgtaaataatgtaagaaatacatatgctacaatgagttgtgaaatgaaaacaacacaattaaaccatgcatgctcccgtaatgatgcatttaaccaattggtgatgtgggttattgcgctaacgttcttaattcagcggcccattagtctgttggtcaagtggttcaatggaagcaccgtgcttcatgtgagcatcttgcctatgcatctaaatgtggttgttgcgtgcttatttttgtaattactggattgcatgtgcttacatctaaaaaattcgggtgataccaccacttaactatactaatgctccaagtggatacttctatttttcgagtagttgtgtcaatcaacaaattccttttattttacgctgacgaactaatatcattagaccacattcacaaatcaaggggctcctcatcttcgtcaccaccaggctcagggctatttaaaacaaatcgatgcatcttcttccatataaactaaataatccttttaaaagagaaaaaaacagaacaatccatgtccttatcaaacacaaaaattggtggtggcaatggacagtattgaacaacaagattttggacagaatcaacacatagccatgtgacgaatgccatattgatgcttgggacgtcatgaggcagacatcaaacatgagtagtttgtttcatcaagcaatcaagcctggtacaaatagaatcatcagggactcagagccaatctgaagtctgaaacttatacgtccagcaccaaacactcaataaacaagggttgtttatttgcatgcgtcccagatcccgcatcaagcaataaaggtgtatgatctgacaattctctattcagagctctgaccgttgctaacaggaatttcacttcccaatccatgctcataagcaccctatccaacttctcaaaagtttgattttgtagagcattcgcccacgtaaatttacgtccagtgagctccagctctctcaagtctaagctatctatgacagcgttaaacaagaaaggccacttatcactatacttgtcattgtttttctcgctagggtttcgaattatattgaaatcccctccaattagaatcggcaaagactcttttctacaagatctgacgagttcagtaaggaaagcctccttatactcctcttgcgcagccctgtaaactgctacaaggatccattggaaggcattttccttattccgcacatgaaactttacatagaagtctccttcatcaatactagaaacgtcaaaaaattccaaatttactcccaaaagaatacccccagatctcccttttggtctagtccaatgccacaaaaagtctttacctccacaaatgttcttaaggcatgcatttaaaaaatcacttttgcatgtctccaagagagcaataaagtctagcttttgctccttggttatgtccgaaagaaatctgaatttagccaagtcactaagacctccaaaagatccctaattttgatcgtcgcggtttaatagtttaaatcttttcttttccttgattaatgtgagaatttctagtctctgtagcaaatatggtggcttctttttaagatattttaataatataataatccctataataaatagatagattgataccaccacttaactatactaatgctccacgtggatacttctatttttgagtagttgtgtcaatcaacaaatcccttttattttacgctgacgaactaatatcattagaccacattcacaaatcaaggggctcctcatcttcgtcgctaccagactcaggactatttaaaacaaatcgatgcatcttcttccatataaactaaataatctttttaaaagaaataaaaaactgaacaatccatgtccttaccaaccacaaaagattggtggtggcaatggacagtattgaacaagaagattttggacagaatcaacatatagccatgtgacgaatgccatgacgtcatgaggcagacatcaaacatgagtagtttgtttcatcaagcaatcaagcctggttactggtacaaatagaatcatcagggactcagagccaatctgaagtctgaaacttatacgtccagcaccaaacactcaaacccaattaaccccagctgcagctggcaccatctttctcgatctgcaggcggaggagatccatccatggatgtggccgtcggtgcggcgagctggctcctcggaaaggtggtgacacagctgtccgatggcatggtggcggcgtacgtgtccagtacagagcttggcctcaacatggagcaaatcaagaccgatcttgcatacactcaaggactgcttgacgcggccgaagagagagatgtcagaaacaaccatggcctacgggtgctcctagaaatcctgaccaagcaggctgacgaggctgaggatgttttggacgagctccagtacttcatcatccaggaccagatcgacggcacccatgaggccactcccatggtagacgatggccttcgtggtcaagtgctcatccatggccgccatgctcttcatcataccaccggtaactggctttcatgtttttgttgttcctctgcacgagatgacgccgatgatccacatgatatacccaagtcccatagtgatgttcctgaccatgttagcaagttgacattcaatcgagtagacatgtccaataaaatcaagttggttatagagggcatacatgcctcatgtacacctgtatccaatttgctcaaaattatccatcctgcagtaggaagggcattaccaccgaagcgacctcctaccagctcaacaattacacaggataaattgtatgggcgggaaaacatctttaatcagactcttgatgccatgactaactttactattcatagtagaacactatcagttattcctatagttggtcctggtggaattgggaagacaactttcgcccaatacctatacaatgacaaaacaatagaggcacatttctctataaaggtctgggtttgcgtgtctactcattttgatgtggttaaactcactcaggagatcttgaagtgcatatatcatgctgaaaatgagggaagccgcagagtggatgaattatccaacttggatcagctccaaataaccattgcacaaagactgaaatccaaaagatttttacttgtcttggatgatatgtggaaatgcggtagtgaagctgagtggggaagcctattagctccattcagcaaaggggatgccaaaggtagcatggttcttgtcacaactcgatttccatccatagcacagatggtaaaaacaactaagccaatagaactgcaaggtcttggggatagtgaattcttcacattttttgaagaatgtatatttggtcatgataagcccgagtattatgaagacaacataattgatattgcaagaaaaatttctaagaaattgaagggtttcccgctagcagccaaaagtgttggtcgattattgaagtatcgcatttcacaggaacgttggatagaaattcttgaaagaaatgagtggcaacatcagacaaataatgatgacataatgccagcactacaaattagctatgactaccttcccttttatctaaaaaggtgtttttcttattgtgccctttaccctgaggactaccattttaataatatagagattagtcatttttgggaagcattaggcatcatagattctggaagtcataaaaatagagctgaggatattggattaaagtatttggacgaactagaaggtaatggttttcttgtgaagaaagttgatgataggaccgggaggcaatattatgtaatgcacgacttattacatgagctagcacaaaatatttcatcacaagagtgcatcaatataagttcatacagtttcaggtctgataacattccatggtccattcgtcatgtatccatcaccttacaagataactatgaggatagttttgagagagaaatggaaaatttgaagagaaaaatagacataggaaatttacggacattgatgctttttggagaaggcaatgcaagcatgcttatccttttcaaagatttattaaaagaaacaaaacgtctccgtgttctattcatgcatgcaaactcgctccaatctttcccgcacaacttttccaaactgatccaccttcggtatctaaagttggaaataccttatgacgtagaactgtctctaccaaatgcagtaagtagattttatcacttgaaatttttggacctagggtacagtaaatgtattttgccaaaagacatcaatcatctagtcaatttatgcctcttaaatgctagaaaagaactctgttccaatattcctgggattggcaagatgaagtatttacaaaggttggaagagtaccatgttaaaaaacgggacattgggtttgaactaagtgagctaggggatttgacagatcttgaaggtgaactgaaaatatttaatcttgagaaagtggcaacaagggaagaagctaataaagcaaaattgatgtccaaacggaatatgaaaaagttggagctagcttggggtatggtgcaacggaccacaagatctgatgttcttgaaggtcttcaaccaccttctaatcttaaagcacttgtcataaagaacccaggtggttccattggtcctagttggttgtgtggtaatatttgtgtaaactacttgaaatctctgcatatagaaggtgtatcttggggcattctcgcaccttttggtcaactgatgcagctagaggaactaactttgaacaatattccaagcacgcgtcggtttgaacctaattttggtggtgttacacaacaaagtttctcacacttgaagaaagttgaatttgttgatatgccagaacttgtggagtgggttgggggagctcattgccatttgttttcaaagattacaagcatcaggtgtgaaaattgtcccaatctctctatgctgcttgtgccatcctctaggttctctgtctcctatgcacaagacataaacaccagatggttccccaacctgtgttctcttgagattgaaaattgccccaagttgtcactgccccctatacctcacacttccatgttgacatgtgttattgtctcagagcgtaagacagatttgttgcgtcttcaagaaaacaagctgatctcacatggatacagaggtgctttggtctttgataacctggacaaagtagaagatatgagtatcgaagaaatgccacacgtttcattgactgatctccaaaagctcagctccctaacaagacttgccgtcaaaggatgtgaaagcatgttatttagtgaagttgaagagggtgttatcttcccttcagttcagcagctcgaaatcagtgattgtcgtcttaccagaaattcattgacaaagctactaaaccgtttcccagctcttactgagttccacttgatcttctcttcatttgaggttggagaggaagcagtattgcaactcccatcctccaacttattgagctatgtcagaatctggtgctgcaagaacctggttcttcctgtggcggatggagggggtctccatgatctatcctcactccaagaagtcgaaattaggggatgtggcaagatgttcgatcggtgttccatggtagaggccggagctcggagcaacaagttcttccctgcttccctcagggaactcaatatcagcgacgagttgagcattcagtccatggctctgctcacaaatctcacgtccctcactcatctaacactgataaactgtgataacctgacagtgcatggtttcgatcctctcatcacgtgcagcctcaaggaattggtggtctacaagaaagccgatgacgagattcatctctactctttagcagatgatttgttcttagaggtggcaacaaggatgacgaaagtaatacctgcgggaggttcctacttccaacagctggaaaaacttgaggtggacagcatctcggcagtgcttgttagccccatttgcagtctcctcgctgccaacctccgcgagttgcgattcaggtatgatttgtggatggaaagcttcacagaagaacaggaagaggcacttcagctcctcacctccctccaatgcctgaaattccggaagtgccttcgtctgcagtccctccccgaagggttgcattgcctttattctctctataaactaaatatcgctggatgtccggaaatcatgtcgctgcccaaggacggcttcccggtctcattggaacgtctaagaatacgagactgcagcatcgatttaatggttcaagtcaaggaattagaagcatcaaacccagatttacatatacggctccactagcaaacttaccacccaaggtaaaacaaggtgctctcccaactcctacatcttttttccccatttcgtctctaacctttcgaactaactaaaactcgttttttattgtttgttgttaatgatgtagctatccagcaccattgcctcatctggaacctttcagagttcttccatcatcgtatagctgacaatgtaaatgcgaattacacgacaacacatgaagataaagagctctggatggcagagcagccactttggctttcagacataatggatgtcctttgtctattatccaatcaatgttatattgatcattacaattttggtaacttacgttctctgtcattacacttctttccatctcaaactgcatggtgaattttggcaggttgcagctgcgtgatatcgaaatccacctgcacttgtatgatctgtacagatccaatagcgacattttgccaatcagccgtgctggttttttttagaaaatagattaaaccggcctctacatccaaaatagatacacagccaggccgtgctggttagtaaatatgcttatgtcgttttgctatttttttctttttggactgaaactagtatagtattgtagaatgtcccgctcttggtcttactttctgcttattactagtagagtgctcgtgcgttgctacgggaattttgttgatcacgggaaaacaaaatctggcaatccaaaagaaactacaagtcatagttgttctaagattaatttaaaagcaagatatatgttataattacagaagcgtagtataacctttttggcgcataaaacaatctcatggcgtttattaaattataaaaagcaacataaatagaagacagctaatctccaggtacgctttcttgatgaccctcgcacggacaatccaccattttcagtgtatgtgatccatttgtacctcgtggaaccgaacaattctgatgtgaccatggctaccacggatgcaaccattgctcacatcatggatgaacaagaagatatcgagatcaagtactccaagtgctggaatccgattcggccacctactacactgctgatttcaaacggccaccgaatctgcatacgacctccgttttcggcccgggagtacttgatggaaagctctcggagccctctttctaacggatccagcctcttctctgaattctatctcgtgtggccagaatcacaggaacaaggtgttgcatcacctataatgggcctatgggcttgtaacttcatttgggaccccggcccaggtggggcccatgtggggtgcgccccaagctggtggagcacgaccctaggcacccctaggtcgtcctcccacccctatatatagctagttaccccttcagggtttctcgggttttgttagattaaagtttagccattgctacttgcttgcagcgcgcgtgtcggctagaccgtccgtctgcttgttcttcggaaccccaacttatcatttgtattaaattcctatttgcaatatcagattgcttttatcttgttcttgcttgtttcttcgatttgcttgcaggaatagggttgatctgcaccggcaagatcagcaacccacggagaggtgtatcgatcgctaaggcgcaacacaacgtctcgtacggttgtagtcggatcgtcaacgtttctcccaaatcgtagttatcacaactcaccgaaagatcgggccaacaacagccttgagtgtcgagaggaactcagggttcatcaggtggtatcagagctttcgttgctcggtgagtttttatcttcctataaccagaaaatagccatacaaaaaaattcgtatcatttacctagccatattgtgccattgcattgttcttttcagtttttgctttgttgaattttgtgttgcatcgtcacgtcgtgttgctggtcttagcgtctagttcgtttagagtttcgagttctggtcacgttttgtaccacagtcgtcgctgccaccatgtctctgttgttgtcaggacctacgaaaacggaatcggctcgctgccacggttctatttttgtagttttcagaagtttctgtcggttagttttggagttcttgagttgcatctagagtttgccgatccttgtgtgtgtttgttttggccgtgcctgtgtcgtgcacgagaggaggaaggtgaattaccatatctgattttggaagtagtcaagtttgttttggaaagatatagtagattggattggttaaaaatcagtttcctttttatcccatacaccaaattcggctgccatccactccacctccttgccgagtcccactcgcccctttggccgagtccgaccccctccctcaattccacggttccgagttgtgtcaaacaccttggcgaatttttgtttggtgtcggtttcgagatctgtttggaaaaacggaaccggcataaattcagcattccattttttgtataattttaattttgggtttagacttttatatttgagtccctgtaaattttatatttatgtttgagtccctgtaatcttacattaaggtccttgagtcagtttttgttaaaaaaaatcaagaaaaaagtgaaaaaaaaggcagaaaggtgcaaaaaaaaagagaaaaaaaaagccgcaccaaaaaaaaacagaaaagaaaaggaaaaaaaaagaaagaagaaagaagaaagaaagaaaagagaaaatactattatgtttgagctaaacttcatatatcagagttgtgcatgagttgttcctagtgctatcttgtggtattgtttgtgtctaggctcgcgtctctagtacgttctagcctaggaccagcacggtacttgactttgaacaattattcaactttgcattatctgatttgagcatttgctattcctttgctacatatttaagcctacccagagctccacatatttgattacagccgtaccgcaagtgtttgccaaggcatcgatacatccaaccttcattggggtgcttggttgagtcggtgtatgtcaccattccacttgcattggtaagatcttgtaagagcttggttaaaagcttgagtgtgtgcgatttttgagctgccactacctagtagttaataggaacgcgcatatttttgtgtatgtttcttgttttctactaacaatggcagggatatgcaagataattggggatagctgtgctcaacatcgacatcttcgtcgagacacgaggagggatcaacatgaccattataaggtaagtgatgatgttctaggtaagatcaaatctgcactgccttatttcgagggaaactatgatcctcgtgcttacattaattgggagctagcggttgatagtgaatttcaaaagcatgtcttgtcggagaaacaaaaggttatgtgtgcctctagtgttttaattaaacatgcttctaatgattggaaacatctttgtaggcataacaaaataccacaatcttggaaagacctgaaacgatatttcagagatatttatgttcccatgtattatgctgacattttgttcaacaaactgcaatgtttaaaacaagataccagagctgttacttcatactatcatgatatgcaagcttgtttattacgttgtggtttagatgaatgcgaagaagctaaagaattgaggtttttatgtgggcttaacaaagaaattcaggacatgcttgattgtcaaagatatacatctctttctcatttgttacaacttgcttgcaatgctgaaagtaaaatagaggaggacatgaagaagcaacatgctatgtttttgtcttctattactaaccatttgcaggaagtgcataatcatgaaaaggaggagagagacatgaaagagccgccagtcccattgatcacactcaaagtcgaggcacctccattatctgaagagggcatcaaaggtaaacttaatggtgctgaaattaataaaggtgagtgtgttgttaatgaattgaatttgtccacttttcatgctatagcagagcaaccattagtggaaccaactgctgagattcctttgtcacaaattgatttgtttgctgttccttgtgataaagaagagttatgcgataatgcttcacttatatccatgccacaacttgtgaatgaacatgctattcctactgttaattcatactgcactgattttaagcatgttgttcacattgctaataaaatagaggagcgtgaattgagatcttctttaaatactttgggttatgttcagtttgatgatttttgtgagctcgataatttcaaggagaaattatttgctaagtctgatttgccatatccaaccaatgttatatttcacatctttggtgaatataatgatcttggaatatattttgtgcatagagtttacatctgctcggatttagaacctcctgtacatgtggataaaatatgcaagctagagaaaaatgttattgctaaccaaattgtctcgagtttgcctagttttgattggaagaaacaggttgttgtaaatggactacgcaaagagcaccatatggaaaaaccgaggacggttttccgtgaagaaggggaggatgatgtgaccatggctaccacggatgcaaccattgctcacatcatggatgaacaagaagatatcgagatcaagtactccaagtgctggaatccgattcggccacctactacactgctgatttcaaacggccaccgaatctgcatacgacctccgttttcggcccgggagtacttgatggaaagctctcggagccctctttctaacggatccagcctcttctctgaattctatctcgtgtggccagaatcacaggaacaaggtgttgcatcacctataatgggcctatgggcttgtaacttcatttgggaacccggcccaggtggggcccatgtggggtgcgccccaagctggtggagcacgaccctaggcacccctaggtcgtcctcccacccctatatatagctagttaccccttcagggtttctcgggttttgttagattaaagtttagccattgctacttgcttgcagcgcgcgtgtcggctagaccgtccgtctgcttgttcttcggaaccccaacttatcatttgtattaaattcctatttgcaatatcagattgcttttatcttgttcttgcttgtttcttcgatttgcttgcaggaatatggttgatctgcaccggcaagatcagcaacccacggagaggtgtatcgatcgctaaggcgcaacacaacgtctcgtacggttgtagtcggatcgtcaacgtttctcccaaatcgtagttatcacaactcaccgaaagatcgggccaacaacagccttgagtgtcgagaggaactcagggttcatcaaattctgcatggggaagacaatatacacaacatgatagctttacacaatccatcaatacaagaaacaatagaatgaaggaagagtgacctccatggttgcacggctacgcattctccatattgtgtgctaatcagccgttcggaagagacgtccgtaagaacgggtggatagttcggaaagaacgtggaaatggtggcaaagaatgtggaaatggtggctagggctggcaacaagagcttcggttgctgctggcgcaacttatatgatgattgtaactaatcacgattagcgtgatcttgccatgccgtcaaaagcgaaaaaagaacaaaaaattcgttgcctggttgtttctggcgttggaccgtaacagtcagatgttatgtttctggcattggaccgtaacagtcagatgttatatgggccgattaggcccatagcttgtttccttggctatttctggcgttggaccgtaacagtcagatattatatttctggggaataagttcatctgaggtcccttgactttacaccaaatccgattttcgtccctcgatcggaaaaccagacacaacgggtccctcaactatcacaaccgatgcagatcaggtccctcggcggttttaagggcggttttggctaatgtggcgcatacgtggctaatttgactcagtcttcgttcgacatggcattgacgcggcgcttacgtggcaattcgaccctgaaaaataataaaacccgtgggacccacatgtcagtctcacatagaaaataataaaaaaatcgtgggccccacatgtcagtcaaactcacccttcctcttcttcctcctctctccccatctccctctcttcatctctctcccctctctgctcctcttccggcgagagcggcgagctggagggggcagcgagaccggcgcccaccggcgagagcagcgagctggaggaggaagccggggcgataaaaggggatcaacgacggcggtgggcggaacagatcgacccggggcagcggcagctccccccggagcagcgccggcaatcgagatccggcagtggcggccgggagaagggcggtggccgatggggagaaggggcgacgtgcagcgatggccgccggaggaggaggagatgcagacatgcggggaggcatggcggtggcagccagaggaggaggacgtccgccgtgcgctgctcccctcggtagcggcggcggcacgggggtcctgggagtcgccgaggtcgacgtcgacgtcgtccgcggccacggccatggcgttcctgtccgcatccggcgtgcaccacagaagcggcggcatggggagtggcgcctcagctgctgcaacggtggcgtcaatggggggaagggaagcgaaagctcctcgctccggtgggctgccgctgacgagctcggtggtggtgaaacgcgacggatcgagcgccatcttggcggctgggggccctcctctgacctctgctctagaccgctgccttcgtcctcttcacccgtcgccggctgtcgtcctcctcgctccggtgggcggtcgctgacgagctcggtggtggaggcgggttgcggcggagggcggtcgccgctccctctcccgctggccaccgccggctgcgcacctctccctccgtccgtcgccatcaagcccccgcccacggcgctcggccatcgccggcctccctgcgtcctccctccctgcccgcctcgccggtctttgcgcgttgctccctcctctcctgctgccggccgcctgccgccgcgcgccgttgtcttccgtggcggctggagagagcagagatagggagatgaagagagggagatggggagagaggaggaagaagaggggtgagttggattgacatgtgggacccacgtgggtcccatgatttttttattattttctatgtgagactgacatgtgggtcccacaggttgaattgccacgtaagcgtcacgtcaatgccacgtcggacgaagaccgagtcaaattagccacgtaggcgccacgtcagccaaaaccgctctcaaaaccgccgagggacctaatctgcactggttttaatagttaagggatccgttgtgtctggttttccgatcgagggacgaaaatcggattcggtgtaaagttaagggacctcagatgaacttattcctatttctggcgttggaccgtaatagtcagatgttatatgggccgattaggcccatagcttgtttcctttatcaattaattccaagagtgcaaataagcaagcaaaatattccatcaaaatattccttggcgggtgttgcagatctgctgcttggagttaacctttctagtttctaatcaagctagatgtgccacatctgatacagagagagcttcttggcagtgtgaagctctggaggtgctttaaaaattcttttttgaaattcatcagggacaatcacgtttcttgcacaatatcaattattcttagactaatagctcttgaaactctactgtttctgttgcatcagttatctggtagcattttctaccagctgaacacacgattctacgtacattttaattccaattttcatgacaagagaataattccttttgatgtaacctacccgatctcctctctgaaagcatattatctgtttaaattgtaatcccgaacgatcacaattaacaaatcacatctcatttttttcaaccggcaaacattgcccctatcaataaattgcatgatccacactttttatcagtaaaatcaagtacagaaatcacaaatgccagcaacacttctacaggaagacaagagcatgttcaaccagtgccattggcaatgaaaaggaagcttcttgcattgctccttccagtttacattcacatcaaggaaccaaatagctggtagatcagagtagtaaaacaccagtactggctcatgggttatctgcatgatggagtataaagtaagtatagtgcactactagtatacaatagcaattaatatttagcagaaaaagagtgtgcatataggtaaagaaggtatttttattgaattgtttaacaaattggtcaggaagacgtgtgaagaacagatcaaaagcattgtttcttccagggaattgattaagtcagatatgctgtagtaggagactttccctgctcgtgcttgtggacaaccatttgtaatgttcctaaggtaatcaaatcagctatacaaaatataattttcaactccaactaattatgaaactttgccatttaaatttgcagacaaacaaaaacaagttacatgttacgtatactgtatacagctatggccaacttatatgtttagattaattatttttttggcaaattttgctacaagatatcacgactttgtggttttagctgtagggcaccgcacgaagtcacttttggggaaagacactctcaaaatgtggttatttgctaggggacacttcattcattaaattaatatttttgtgctgactaagcgagaaggggcctacttttttacatggcatgaccaaattgccctcatctctttctcttcctctctcttcctcctttaacagcgaggccgctactgaggcattgcaacggtgtgtggggacgggcgtgggcggcggtgcatgggcgatgggcgcggcgttgcagcggcgcgtggggatgggcgtgggcggcggcgcgtgggcgatgggcggcagcgtgcgggtacacgcggaagacatcggcgcgtggggatgggcgtgggcggcggcgcgcggggacaggcggcgccgacgagggagtcgcgtgatgcggcggcggcgggcggcgctgaggagggcgttggacagtgccgggggcggacgcagcttggggggcaggatggcgacgggcgtgggcggcggcgcgcggggacgggcggcgccgacgagggcgccacgtgatgcgccggcggcggacggcgccgaggagggcgttggacagcaccaggggcggacgcaacttggggcagcgggatggcgacgggagatggcagaggctgctcggggtcgtgggttagcgccgtccggcggtgatgacggcgagcaggatggggaagacgctccggtcgaaggcggcggaggtgtcaccgccgcgcctcttccgcttcttcatcacaaccctgcaagtttgattcgtggcggagctccggcgaggccgccgccgtgggcgctgttggtgcgtgccgcctccccctgcgccaagttggccgcccatcccagcgccgagctcgttgctcgtggccgtgggtggggtgaggacgtcatcgccggtggaggtagaggaggcaaggagggaggtttggggtgggggaagaatatgacaagtgggcccgagggcatttttgaccttttacactgtttatctctcctattgaaccagaaattaatattttattggctgcggtgtcccctggcaaataaccacattttgagagtgtctttccccaaaagtgactttgtgcagtgtcctacagctaaaaccacgaagtcgcgatgtcctgtagcaaaatttgcctatttttttttgtccatgtgaatctaatagtggcctggtatagatggatggtcgacagcaggggagagcagcaaagctgctacacttggccactgcaccctcttttgctcttccttgctgaccaccctaggagatggattacaggcgaggcaagggctccagatcaatatcatccagaaaaaaagtagtatcacaatacccgtaatggtgcatatagtccgtgccaaaatcccaccgaaagtaatgtttactgctgtccaagaaaaaaacacacgaaatgttagacttggaatataaaaattacagaaagaatggaatttaagcaagcatattatggatggttaatagtcacataatataccttttctaatctgtgaggacctctctatacacaatattttttgtgtatgctgctgtctgtttagacaatttctttcctttcttctcattgtccttcacgccagtacgcttagactttttcttttgtttcttgtcttctaccggcatcgatagtatttttatgtttgttctagaggttgctctagacaacgtgacgtatagttgaccatgagagaagacagactctggtaaatagacgcctgcatttggaattgtttgtccctgcgccttattgatggtcaatgcaaagctcaatctaaccagaaattgcttcctcttgaagcgaaaggggaacatctcatcatccgaaggacattgaggtatccgaggaaggaaaactctcttaccagcatgctgccctaccacaatctctacgtcaatagcatttcttccgaactcacgaaccaccagccttgtcccattgcaaagtccgttggctgggtcaatgttcctcaatagcatgatggggcagttaatcttcagcttaagcacatgcggaggtagcccatttagagttagagagttcaagaattcaggcgggtaatagttataagggtcatcctctggtcgatcaaagctatgatatgtcaccacctctcctctaaaccgcccaatcattttcatgttaattcgatccacgaactcattccgggtggacattatggtcctacatgtgatgtagtttgggttcgtaagattatcgtttaggttggggaacacagtatcgatgagcctttcgaggtccgtttcattctctttgcacgacatgcaaatatccgtttcacctcctcggtgccattcccaactcgaaggaggtagtccgcaaaccacacgtcgctctgcaccctcatattgcgaacaagcttcaattgaaccatacaatcccaaagataggacctgcgcagagtggcatctgttatctgagacctagcgcccttcctaatgaccgggagcacctgcctgaagtcccctccaaacacaatcgtcttccctccaaacggagaacacggacaacccattatatctctcatgctcatatcgagggcctcaaccgcttgcctctttgacatggaggcttcatcccatattataagcgacgccatctagaatttggagctcactgcaacacggcgcagttggtgctccaacattccttcggatggccctctccagtcattcgaagtccaaagtccaacacggcccagtccgccacctcccctttctcacccctcgccgccgtccccggctcatgcctcgccgccgcctcatcacctgctgccctctgctcaagcctcgccaccgcccccggctgctcaccacctgccgccgccgccgccgtcccgttactcgccgcattctccacctcctccggtgcacaagtatccatcgccaccgcctcacggcaaagctgccgcacccccaccgcatggccacaggaagttcccaccgccgtctcctcattcagtgaatttggcaatggcgcccttgccatcttatttcagtgccgatccgccatataactaagcagagctgatcatcagcagctctgattgatcggcgacgcacggaatggagcatcgccacattgctatcttttggtatctttgatatgcaaggccatgataaacaccttagctaattaagtaaactcgaggtgaaactgttaggcaaataatcaaaagcccaggagcaactctctgagtgcgttcgtgctttttgtaacattttatctcttccaaaatttaacgagaaagttactgagtaaagtatgtggttgctttgaaatcatggagttgatgtaatgttgttgcttcgttgttttgttgcatgcatgttgccatgttctgtgctggtggatgtgaattgtgacacatgaatcacgctttatttatgctcataagtcatcactattacttgtatgtcatttactgtgtattttcactggtgtatgttgtaatatacttgtatgcaacagtttattggaaaaaacagcggcaggcaaacattgagataagttcaaacatcttaaaatgggtatgcatctgatgacagtaaatttctatatctacaagtaaattaattaggtcataattacatccttagaaatcttcatatatatgaagggctacagaaccatattggaccaaattgtgtagaataccttgctattaacagactcaccagtttaggtttgttaagtggcaaagaaaacatggtaaaacaaagttatcatcttgcaatactgcaacttggaaatagccaggaaaaggaatagcagatacaactcacctagtgtcagattgcagcaacactgcaacagaaaactgcataaggttcaccaggccaaatctgcaacagaaatttgctcggctcattaatctgaacagatatacaattcaagaaaattactttttagcaagattaaccctgctattgtgcatcacagccaggggcaagactggcacctaaatacatctgttcacaactgagcatgcaagctccaacctgtttggttctataatgactataagtggtactttcagattcagcatatgcagagacttttaacagtaggctagtatcggtctgaaatccatttcctattgatccccaacgagcagaaaagagcaggctggtactttcagattcagcatatgcagagacttaaaacagtaggctagtatcggtctgaaattcatttcctattgatccccagtgagcagaaaagagcaggcaagtataggtcataaaaaataaagtgcatcggtgttctcccgaccattttagttttgcagcaaaagaaccagcgaccgcggctggggagatctgttcgggggagttgacaatgagatggtggccagcggccctgagtcccggcggcagaggtggagtacagacggacggcgaggcggcactgaaggaatagtgatcgctggtgacgacgacgcacgctacgacggcggctgctcggcggcagaggtgtagtatggacggacggcgaggcgacacagagggaatggtgatcgctggtgtctggtgacgacgacgcacgctacgacggcggctgcgagcggagaagggtagtcggcgatgaggggctcgaccccgccgcaactcctcccgagcggcacgaagggcggcggcgtgagaggggcggcggagcagcggcagcaggcgtgagaggggcggcggagcggcagcggcaggcatgataggggcggcggtgtgggcgtggcggcaggggcgggccgtttttagggcacgggtgcgggcgtgagaggaggcgctggtggggtcgtgagagggggaggcgcggggtgcggtgtcagtacgtctagattggttcaccatccctcctgcgtattttttaagtagtataaatattcgtagaaatatccataatttcttgaagtgtcacatggcggcttaagaatgctccacggatatgaaatcatgtgactaaaaaaccatgtaattttttttacaaggttattaatgtttatgcggtggcttagtctactaattttaaattatgtagcaaattcttacagtataataatatcaattttaacttcgcccggccctccggcgttagcactagccgttggatgctgctggccaacggccaccgctgttgacgatcgttatcgaccagtttcgaccgtcaatattacccaatgtatgaagactagctatgcttgcaatgcataaattccaaataaaatatctacttccactatatactatgctagtaacatgtatgcaggagaagcacatataaatggaggagaatcgacagaaaatagatgaacgatcaatcagacgttgtcgagaagtagacttgtggatagataggctgataatacagaattaatatgagtaaacaagcccataattcacaccattgggctaaggaataaacgaggagtacacctgccaagttctgggccaaatggaccagaccagggttcggccgaaccaaaagcagcccagatggcccagaaattccacaggccagtagttatcgacatccaatggcggttatgaccgtttctacctgaagcaaccgtcatggacacttgtcacaaggagggagaaagatgctctttggatgcttcatcatgccacatgtcaagaggagagcaaagatgctcctaggatgcttggagcatctccacactcccaaggcacctctccacctataaatacccctcctctcattcattccctcacacactcaagcaaggatcaaagctctctacaaagtagtattagtgctagtggagtagtgttagaatagtttccaagtccgcggaggcttcggggagtttggtaaaggttctatagcttttcctttcttctctgtaagacttccatttatcaatattatattcttctttatacaagttcagtactttattccaatcatagagtatgagtaccagtcttagtttatcaataagtagtataatatgtgtagttaaaccttctgggatttgcattgattctggtatagtgtctgattaccgggtcataagtctgctctggctaggccgagagctatggtccggggactcaggtgctctacaccgattgcaaggctatagagtaataagtagtaatttaagcatggagcttaggttaccgcttatcattatttgggggtatattctctgggtgatttgtaggccgctgatggtgacagctcagtatgggcgtctcccccgcagtttatattcctacatacaatttcctggggttggatacacctccgtatcctacttcggttggagggttatgacaggttatcgtaagaaactcggcaacccggggtaactttgcgatgcatcgggagggcatagctatgcttaggcttagctatgctgcattgttaaaggggttatactacatagtgtatactagttataatatactaagatgttgtatactagaagtacaggaatggaacatatctaaactactgccacttagctataattaggagatgtaggagttagataaatccttagttgtgtgtcactctacccttaagcttaacttacccctgcatagaccttgatgtatataagtaatatataactattagcatagtactctcttatcatatcttcccttgggattaaacaaatacagtaccttagaatactcccgagtgaaatgctacaatggtatatccgtgcgcttgaggatcacatctgtaaccataggaaggcgaagaccgagtggaggtcggcgcggacgctggcggtgcgccaggagctctgccgggacgctgatgtggaggcggtcgacttcgaccctgatgacgacgacctcatggacgaggacgtcgccgaaaacatgccggcgcccgcccctcgcctctgctacaccatcgcgggtggcggcgacgacgggggtgtagaggtcggccttcatcgagtcgacgacgttctcgcggagcttcatcaggcagagggcctcgtcgatgatcgatcccgttcccggcaccggcggcggcggcggcgttggtgcccctcatcatctcctcgtcggtcacccgctccgccgccgggcagagcatgcaaaggccgccgcggcggacgcacacgatgttgccgcgcatgatgcggagaggcggcgccggccggcagcagcggcgtcggcgccccttctctgtctcctctctcaccgtgttctctgagttgataaggggaaattttgtctcaacacctagtagaggagagaaaatcttttcgaaaatgaataaaatagcgaaaatggcaaagtggcggtagacgcacgcttcatattggcagtttatcgaatcacgtcttcgggatggcattctagcgaaaccgcgttttgaacatggcgaaatgtccattttctcgtggggaactgagaaagtgggaatacggtcgggacgccactctcgtcggcgcggggagacgaaagcgagaaagacgttggtgccgggtcaatatcccatcggcgagacgggagaggacgacggcgttgattggcggaggcgggaggcctaccgcgtacgggagggtggaggatcgatcgcctgcgagaggggatgaggcggggattccgggcgtggaggaagctaggatgtctcgcctagaaattcatgaaccagaatttctaagctgaatgtgcattaaacccctgtccaggaccagacagggtacacaatcgacaattgttgacatacagatccacgtcttacaaaaatataaaagattacaaatgcagcggaaaaaataaaacgagctagacttggaagcttgacttcagcagcggggcgactccactccacaggcaatccttgacggcagcgacgaaaccaacctcaacaagacagctccaactaggaagatcttcagctctggtgtgggggaaaagagagcaagactgagtactacccactgtactcagcaagtcataccggaagaggagtatgatgcaggatataaccaaaggaagctaggggttcatttgcaataaagcaggcatttaaaagcagtagttgaaaacagtaaagacaattgtagtaattaatcaatattaaccaatcagtgttcaacgctacaccacgttgcaacaggcccaaccagccacctgaactacactagttcattaagctaacctaggggtgagactaatcacggtgaatctggttgatcgcccataaccgcgggcttttcgaatagttttactctggccagaggtgtacaactgtacccacaagacacgattccacacatgtcgccatgccccgaagtatcaccatgatactgcaaagggggaaatcgtgacaagaccctccacataaccctcccctaaccatccacaccacgctaaggtttcacccccacccctaacgggcagtgggcagtcccctcgtgcgccgcggtgaatccggcagctggacaaccggacaccccggccgacccaactccatcacgcccacccacgccaccggtgcctaggaaagggtcgagctatacttcagatcaagcagttacccactcccgcttgtggtaagcacggtaagtctcccagggtttcccgtgaaccggtccttaattgccatgggtgcgaccagcaaaaccatgcactcgcagcccgccattcagtgtattttaattaactaacaccattgcggtggcaccaatccaaagctatgctaatagacaaagtctatgtaataatgtgatacccatttgtgtactagttgaactaagcatggctaagcattttcctaaaccaacatctagtcattttgatacccaagttatcaatggcataaggtaaacaataaatggctgagtaataggacccatcccacatgacattgtaaaaggatgcaacatttaatagaaatgcgggatatttgtaaattgggtacaatatgatcaattgtaatgcatgacttgccttgctctcgcactgatgagacctcagcaacgtcttcgagaaaccgcggatcgacgaaacggccagtctacgcgacaaacaaagcacacaagcaaaacatgctataagactactgaaacaggaaacaaaaccatttttaatggattctagggatttttataaatttactgagacttgaatggatttaaacagagctcggatgaattagttatgattttcagaagataaactgtgtttttactataaaaagaaaagccttattggtttattgcgcaatatatattcccagatgatgtcagcaggggggcgccgacatgcgggcctcactggcagcggctcaaagggggtggtccaccgtggaccaggtccacggggccggggtggtggtgtatcacgtggcgtcgacgtggcaccacgtggctggccacgcgggccatgggatggacggccacgatcgggcgagggccgatcgggcggttggggacgggcggcaccgaggccagcccgggcatggcgcacggtggcgaccggcgaccggccggcggcaacggccggcgacgcggacggcggcgcggtgcgacggcacgcatgcggggagcggcggcgcgcacgagagaggagaggaaggggaggaaaagggggtcctcaccgaaggggcgacagcgaccggtgcgggaggggaggagcggcggcgcaggaggcagtggcgaccggcgcggaagcggcggcagcgcacgggcgaagcggcggcgagcgtgcggggaggcggcgcatgcgggagagagaggtgggaggaagagagggggttcctcaccggcgagcacggcgaccggcgcgaaggatgaaggcggcggcgacgaccggcgatgcggaggaacggacgggcggcggcgacaccctaggagaagatggagaggcgttaggagaggagacgacgaccacggcgctttaaaccccggccgaagatggggaggacagcgcgactcaccggtgtgcgaggagataggcgctccggtgggattccagcaacgtgaggcggcggccgggaaagctcttgcggcggcgaagctaacggcggcggcggcttggcgcggcggcggccctagcggcgacggtatgtggccggagatgagcggcagcggcaaagctcggcgaacgcggcgcggcggtggtaggaggcacgggaaagggtggcgagagtgggaaacgagagagggggctcgggggagcgatttataggtgtgagagggagcggacgaggccgggaaaccaccctactgcgccggcgacgtgggaagatgggaagggagagagagaggggattcaaatttgaatcccagtcggtgtggggcgcgcgcgcgtgcgggggaggtggaggagtgggcggcgacgtgggcacgagcgcgggagaggcgcgggatgggcgtggaggagcggcgtgggcggcagcggcggttgctgccgaggcacgggcggcgagaggttagggacgacccgactggtgggccccacctgtcggcgccccaagggaggagaggaggcggcttgggccggcccagcaagagggaggggcgcaggagagagatgggccaacggcccatcaagagaaaaaggaggaagaaaaaaaagaaaaaggatttttcctgggatttatattgcaccttggtgattttaaattggttaaaattatttccaaggctctgaaaattccactaaaaatcttgttaatgcattagggcatggggaactcaagaaaaattccaccacgccatttctgattattaattgcatttattaattagggattagctctaggttcattaaacaatttcttcgggcaatttattaaacaatttttaaagcaaggaaaaggggaaacttcagggcgtgacataggataaggcgccgtggtgggccgagggggaagatgaggatggcgatgaatcagagggggaggcggtggcggagtgcggcagcgcgagcgtcaggttaggggcggcaccgatctgggcgacggacgggacgggggcgcgggcgcgctccatggcaatgtgcagagggaaggtgtgggaagaggcagcgattgatttgctcgcatgcgtgattttcggccggtcaccccgcgtgcgcgcaatctctctcccacagtgtgaccccgcgtgcgccggtaccgttggatctagaagcgttggatgatttggaccgttagatttgatgaatgagtaatgtaggtgtaagagtgagttggtgaattatagggtagatagactatagttcgatttttatattttcctcaattttctactattaatgtaggattttctagacaatgagagtactaaacgtggaggcttctttttctattaatttattaagttaatagatttctagtatttattaaagtaccatgtggtaagttaggagcgtttgtaggagtgtcatatggcggtttaggattatttgtaggaagtttaatggatttctagtatataatagatagatagactagttttcacgagccgagctaagccgaatcggctcgttagccccccttacatgcgcgaggttgatccgacagctaatggcagtggactgagatctattatattattaaaacagccttgaaaggaggcaccacgttcgctgtggaggctaaaaattcccacattaatcatagaaaaagaaaagaagaatccaaatagaaatacaaatataaaaatagctaacattcggaattaaaaatatgcattattgaaagaggagtccatatagcaacccaatacatgattaattaaaactcggaataaaaataaaataaattttgaaattagaaaaagaaaaaaaaacaagagttcgagaaggaatacaatttaaaaatatcttaaattcagaattaaaaaagtccatacaggaatccaatacaagattaattaaatttccgaataaaaaaataaaaaacaccgaaattagaagaaagaaaagaaaagaagagttcaagtaggaatactgtcagggttattgataccacatacctaatagtagttgactaaatctcggcaggacccaccacataccatgtcttatacggaaaaaaccttcggatataggaggagttccgtataaggaaggatgaatagagttctacatgaaaacgacaaggactactcggattgtatctatattggtttccctagttctacttagacaaagggacacctatgggtataaatacaaggtcccctaggaggagaggggacacagaacaatagatcaagacacaagatcaacatacaagccaacatgcgccaagacaagacgccggatatcgacttcagagataagcatagctagtcccctacggtgtctacggatactatcaggagagacataacgatgtctttgatctcgccggatgcagattcgaggaggaaggctactctgttgtcgactacgagtcagcacttcagaccgccaagtcgacaacagttatataggctaccccaaatattgtactggtgcgattttggtgaataagagcaacgaccggcttcggccaacaggagtagggttattacctgacaattcaggggcccgaacctatataaaaatcctcgtccccatctcttttacctaagtctcgcatatatcctggtaccaacgatccccatactatgcaaataccgtagtcgtgacatcaaacgtcgacaaatacaatttaaaattaacttaaatttggaattaaatataagcaatattgataagagtaaatataagaacccaatagtagattaattaaaaaatccgaaatttgacgggccgtagaggagtatagttgcatcgtttgacgggacttctaaaaattaataataaactctaaaaactataaggtccaatttttaaaggtttggaacttctaaaaaatataaaaaaaccaacgataattatgtttgatttttaaaatagcaatggcaataaagagaagatgcagtggacggttgtagaggagtataatggcagcatttaatgggacttctaaaaattatacaaaagaaccctaataggacgataaactctaaaaactataagtttttaagatctaatttttaaaggttctaagaagaatgaatagaaacggtggtagatcaagcaagctaataaagaataatatgacagaagtaagtggtagcaacttatgtgacttttaagaactataaaattacaaacacgaggatgataagatttggtctttcaaaatctcaagatatcgagataaatttttaataaatcttaagtaaaatcatattaaaaaatatataattttatatgggtgctagccgcgcaattgcgcgggcagtttaaaaaactctgtcacgtataaccagccccagacgcaaccacggtggttgcatccaagcgaaggatttcataattaagtcattaatggccaatttggctctaatgggacttgttaattaattttctcctgattcttgccagctaaacccaccatcctacaccttacccatgagagggatgggatggcatctcaatctatgggcgccgggcggttgatgaggcagacaaaactgatcaattttcttttgttgcattgtgaatgagcccaagctagtagaaaaggagtcatccggacctcgtctgaagtccgggctcctgcaggcagcattatacccatcaatacacaaacccaatcaaccccagcaactttccgggccatcggacgagctggtccatggaggcggccgtcggcgtggcgagctggctcctcggtaaggtgttgacgcaattgtccagtgacttggtggcggcgtacgttgccagcaccgagctaggccttaacgtggaggagatcaaaagggacctcaagtacacacaagggctattgcacatggcccaggggaggaaggacatcagggacaacattggcttacagggccttctgcaggatctaagcaagaaagccgacgaggccgaggatgcattggacgagatccactacttcatcatccaggatcagattgatggcacccatgaggtcataccggaggcagatggtggcctccgaggtcatgccctccacggccgccatgctcttcgtcatactgccggtaactggttttcatgctttttttgttcttctgcacgagcacgacatgatgccgacgactcgcaagatacagccaactcccatggtgacgtcattgaccaggttggcaacttgccattcaatcgagtagacatgtccaataaaatcaagtcagtggtaaagggcatacatgacttgtgtacgtgtatatctagattgctccaaattaaccaaactgcaggagaatgggatacatccctggagcggcctcccactagctcaacgattacgcaggataaattgtttgggagggaaataatctttagacaaactcttcatgacttgactaactgcaatattccgagtggaacactatcggttttgcccatagttggccctggaggaattggaaaaacaactttcgcccaacacctctacaatgacaaaagaacagatgcctacttccctatcaaggtctgggtttgtgtgtctactaatttcgatgtgcttaggctcactcaggagatcctaaagtgcatacctcacgataaaagcgcgggaagcgaagcggtgcataactcttccaatttggatcagctccaaaaagctattgcagaaagattgaaatcacaaatgtttttacttgtcttggatgatatgtggaaatgcggtagtgaggcagagtggaaaaatctagtagctccattcacaaaaggggaagccaaaggcagcgttattcttgtcacaactcgatttccatctatagcacaaatgttgaaaacaaccgagacaatacaactgcagggtctcgaggatagtgaattcttcacattctttgaagagtgtatatttggtcaagacaaacctgagtgttacaaacgcgacttgattggtattgcgaaagaaatttcaaagaaattgagaggttccccactagcagcaaaaactgttgatcgtttattgaagaacaacctttcccatgaatgttggacagaagttctggaaatggatgagtggaaaaatctgcaaagtaacgttgacattatgccagcactaaaaattagctacgactaccttccttactatctaaaaaagtgtttttcgtattgcgccctttaccctgaggaccaccggtttaataatttagaaattacttgtttttgggaagcaataggcattatagattctggatatcaaaacgatagagctgaagcaataggattgaagtatttggatgagctaataggtaatggtttcctcatgaaggtaactgatcgcaatagtcagtattatgtaatgcatgatttgctacatgagctagcacaaaatgtttcgtcacaagagtgcataaatatagaggagttttacggtacaatatacttgcaatatatacttgcagtataaataatctaacggtgtggattcatccaatcttctttttacagtataaactagcatggtggcccgtacagattgtgcggctagtatcattatattttctctcatataatagcacatatgttttctcattatattattcaaatatattaaaatgacaacataattttaaattttgcaataactttacgaaatcactaatgtgtaatattcatattgtattttacatacgtgttagttattaattatttttaatattaaattttagttatctgtaaattatatatattcttcctatatggactttagactcgtcttttaatatttattgttttaatttctaaattttcattatttctaattgtatttctacgtggactctaaacttaattttaaatttcagttacttctaaattgtattcctatattgactttaaactcttcttcccatgtttttcttaatttcgaattttagttatttgtaaattatatttttatacggactctaagcactacttttaattttattatgtttattccgaattttagtatggactttatactctacttctaatattccttatttttttaattccgaatttctattttttttcttaattgtatttatatatggactctactctacttctaatattccttatttttaattccgaatttctattattttctaattgtatttctatatggactttatactctacttctaatattccttattttttaattccgaatttctttttttttcttaattgtatttctatatggacactatactctacttctaatattccttatttttaattacgaatttttattatttcctaattatatttttatatggactctatactcatcttctaatattccttatttttaattccgaatttcagctattttctaattatatttctatatgaactctagtctcctcttctaatattctttattttttaattccgaatttcagctatttctaaattgtatttttatatggactctgctttttctttttctccaattaatgtgagaatttctaggccatgagagcgaacgtagaggctcatttttctatttctttaataatataatagattgtgaagggtatatttgtctttctatattttttgcgggggatatttttgtattttcgcattctattctttagtcagatctggatagtgagaaagggactcgtcccatgcgctactgccgccgccgacagccaccacgtcgcgccccggctcgccgctgacagccaccatgatcaaacgccgccacactcgcatgctatcacgtatggggagagaggaaggggaagcagcacagagcactggagcagcaacatcagctctgcagttgctgtgtgtctctgagatagttgaacgagtgttggtcattcttcagagttcaggctagcgtgcaagatggaggtagatgtgtgtcgttaatggcttacggcatctgaactacgatgtactaaatactgtttcaattggaaggaatcgctctgcctccacgcgtgctcgtccgtcgacaatcggttcgccgccacgcacaatgtattccgaagaagcgctgctgctctagcagaacgtactacgagatccagaactaataccaactaaacaacccgtccgagattaactccgggtgcaaataaatctcaaattcaaattactaaacagccctttctatatttttcacaaataccaaacttacctttctatatactgcaagtatatacttacagtagaatgtaccgtaaaagttctctaaatataagtccacaaagttttagatctgataacatcccacaatctattcgacatatatctatcactgtacatcataaatatggccaaagttttgagagagaaatggaaaatttgaagagaaaaatagacatagaaaatttacggactttgatgttttttggacgatacaatgacaatatggctatatttttcaaaaatatattcaaaaaaaacaaaatgccttcgtgttctatttatgtttgtaaactctatcaaatctttccctttcaacttttcaaaactgattcaccttcgatacctaaagcttgaagtacctcataacttagaaatgtctttgccagccacaatatgtagattttatcacatgaagtttttggacctaggccatggtaattatattttgcctgacgacattaatcgtctagccaatttacattatttccttgccaaaaaagaactttgttccaatattcgtgggattggaaagatgaagtatttacggaggctgcaagaattccatgttaagaaagagcgcactgggtttgaacttagagaattggggtatttgaaagagcttggaggagcactacaaataaataatcttgaaaatatagcaacaacggaagaagcaaatggtgctgaattgatgttgaaaaggaatctaaagacactagaactagtttggggtgcagagcagcagaatagtggatctgagattattgaaggtcttcagccaccttctaatcttagagcatttggaataagaaatcatggtggttccactggtcctagttggttatgtgatgatatttgtgtgaaaggattgagatctctccatctagagggcatctcttggggcactcttccacctttcgggcaattcatatatctagaggaacttactttgatcaatattgctggcattcgtcagttcggaccagattttggtggtgttacacagaggagtttcttacacctgaagaaagttagatttgttgccatgccagaacttgtggagtgggttgggggagctcattgccatttgttttcaaagcttgcaagcattgagtgtgaagagtgtcccaatctctctatgctactaccaccatcctctgagcgctgtatctctcatgcacaagatataaatatcacttgttttcccaacctatgttctcttaatatccgaaattgccccaagttatcactgccccccatgcctcatacttccactctaacgcatattattgtggaaggagattatcaagaagtgttgcatttggaagaaaagatactgagtgtaaatggttatggtggtagtttggccttccataacctacagaaagtagaaaacatgaaaattgaaaagatgtcacacatttcatggaccgatctccagaagctgaactccctatcaagccttaccatcataggatgcaaaagcttgttgtgcagtgaagtagacgaaggtgttatcttccattcagttgagcagctcaatctctataagtgtcatcttgccggaatatccttggcaaagctattaaactgtttcccagctcttacaaagttcgagttgaacaggtccggtgaagctcaagaggttgaggaagcagaactgcgtttcccgtcccccagactgttgcgctatgtcaagatctttggctacgagaacctggttctacctatggaggttggagggagtttccaggatttctcctcactccaagaactcgaattttggcgttgcggcaagattttcgcttcgtggttcatggtagaggcaggaactcatcacactagcaagcccttcctggctccccttaaggaactcactatttacagcgagtcaagcgtgcagtcgatggctgtgctctcaagcctcacatctctcactcgtctgcgactagtagactgtgataacttaacagtggttgggttcgatcctgtcatgacaggcagcctcagtgaattggtgatttataataagccagatatagacgataataatcatcgctgctccgtagcagcacatttgttcgcagcggtgtcaacgacgaaggcaatacctgttggttcattccaacagcttaagaagcttgaggtggacagcatctcagcggtgtttgttgcccccatttgcagcctcctcgcttccaccctctacaggttgaggttcacttatgatttgtggatgaaaaatttcacaaaagagcaggagcaggcacttcagctcctcacctccctccgaaatctagaattctatgagtgccaccgtctgcagtcccttcccgaagggttgcatctcctttcttctatctgcacattaggcatcgtcggatgtcctgaaatcagatcgttgcccgaggagggcatcccagcttcactgaaaaaactactagcaatgcgttgcagcgtcgacctgaaggatcaactcaagagattagaagaatcaaaccaagatttacaagtattctacatctgatcacccaaggtaagacgtgatgtcccaactcctttgttttttactctttcatctgcagttgttcatatttaaactcttttttacctgttcgttgttactgttgatcatctagcgagccaccactactctcttttgaacaatgaagtgcagatacacattctaaagtcatttgaacaatgataaaaaatcaaatccgatgggaaaaaacaagaaattgctagaacatgttggacaatcgccatcttttcttactgtgcgcaacaagcctaaccttggcattatggaaactttgcagtaactttgcagtaattagatcgtggatgttctgtacgttgctttattgggagtgatgaccaaaccatttgccacacatagcttgtttttttcaagagaattacagttttgattaaggagcaacacccaaatgattgtggagctaacctcgtttgtctctatttcatcatatgttatgttacagttttgattaagcagtattagatttagatgagagcaactgtaattgtttatggttctggtaacacagtttcatggtcattagtaggagaattctttgaccttattaacttgttccctttcagcaaagcattgtggaatggtgttttttttagcctattcagaaccagttttttacataatggaagctttattaatctcagtaaatttcatcaagtgatacaattattctgagagcacattcggcttctgcaccaaagagtacacacagccaacaagaaagaaacaaaagataaactcatcatccaaaatagcagaaacaaaaagaactttaggagcccgctaaccgtagcctagaacgtcacccatgtgctggggtagaaaactactatatggccactaactctaattgttgacaaaccgcaatgatagtaccctgcaaattgaccttctgaaggatagcctatgagcggagccaatgtgtaatcaaaaagataacctgcaaaggagaagatatgttttttcctttcaaaaaccacattatttctgaaaagccaaatagaccaaatagtggtagttgcacctaataagaccaaagatctcaaattgcgtgattgtcttcttatccaatgcccaaacatatgagttgtactattagataaaactaatattcgaagcaaactgaattaaagaccaaaccgcgcgggcaaaataacaatcaaagaacaaatgattaatagtttcatctttgtggcagaaagaactagacttgtttcctctccaattccttttaatcagattatcttttgttaagattactccatggcgtaagttgtcacgcccgaaaattcactagtaatttccgaacttatttgtgcataaaatcctcgtccaggaatcagccgaggtacacaaactaacaatttaatatacagattcatcaaaatatctaaaacgataaatacttactaaagaggcacttagtcctcaccatgaagaaaactgcagcggaaaaaaaaaaatctagcgaagctccggctccactcccacaggcagctcaactggggtataagccaaacgtcttctccttctggatcctttttcttcaactgaggttgattgattattgcaaggtgagcatatgacatactcagcaagccacacagcaaatatgcaagtgcgcaaagataccaaaggttggcataatataggctcatttgcaaaagcagcatttagcaaaacatttaagagaagtaaaacagtggagtaattaatcagaaattttaatcaacactgaacaacacgcccatgctgctcaggcctaaccattctgaaacaaccatacccggctgtacagatctaatctccaatccaggagctaagcaaattattaccagatataacatccataattattgtgagaagtgtgggactaatcacgaaaaacattgctcaacccgcccataaccgtgggcacggctattcgaatagttttactctggccagaggtgtaccactgtacccacaagacacagccccacatcatgtcaccatgtgcctcagtaccaccacggtacctcggaaaggggctgtgacattaccccttgcataacacaatccaccgcagtgcaccattcctggatcataatcacccccttataaataaggcatggactccccagcgacccccgtgggcttatctccgccacttctcagtctggtgccccgcaatgaaccatgctatacgaaaggtaaagccgttgcccacgctggcttgtggttggcacgattaatgtttcacaatagtagctcgcgaaccggtccttaattgtcatgagcacgactctcaaaaccatgtgctcacaacccaccattatcaagttttagttggcaagtaattaattaaccaatcacgattgaccatcgtgaactatcattaagccatcattaaataatgagtcataagttatcccaatagtgtgctaatgtttctaagcatggctaagcaatcatatctaatatctagctgaaccaatatataaagctcaacttgtcaagttataataatccaaggtatcaaggaataaagtaatcaatgcaaacaggccataacaaaggaataggttcacaccacccagtgacattcgaaaataaatgcacagttgaaataaatagagaatttaaatataggatcaacatgctcaaaggattgtgtttaggatctgtgtgacttgccttgcaataatcggtcttcaattaatcttcttgaacacttccggcgcactcacgaaccttcgcaacgacggaaacgacaagctaacacgcaaaacgaagaaaaagactaataaaaaccaaataaacagtacatataaagtaaacaaacatgtagatcataattttagatgaattatgagacttgaacggcctcattctgacttcataagaatttattatgaattttacaagattaaatctaattaaagcccatttaaaaagaattaaataaatttaattctatttatggacaattttaatatgtagatctttattttatataatttttgcaacttgaaccacattaaactgagttcaaatgaattagttatgaatttttaaagattaaatcggattaaaacacttatatggattttaattgaattatgacgcaataatgaattatttttgaaaaggaaaaggaggattattgcgtcagcagctagggtttcgcggtggaccgggtgcacggcaacggttcatgggaacgaacggccgagatcaaccctatccaaaacggacggccgagatcgatcggtccacgaccggctcacggcggacggtcccgatgacgtcagcgacaacgtcagcgatgacgtcagcaccggcggcgactcgggcggctcgggcgcgtatgctcgccggcgaacggcggctctacggcacaaacggagggcaccaagacgtagatcacggcgcggcgaactcaccgatgaccaaaacgtcggcggaagaccaacggacggcggcggcgtcgaggaaaaggtggcggagaagatcgggtcgacggcggcgacggtgctccgacggtcttcggcggcggtgaagcggtggacgaggacggcgacgcgacggcgaccacgatggcgatcttcccgagcgacggcgacgtctggaacggcggcggcgcacggctggagcgacggcggcgacggcggcgctagggcacacggagctagggcgctacggacgacgagaggcaaaggcgagggtggcggcgggtagaggagacaccggggatccttataaaggggctaagaggcaacggtgaaggcccacggctgccggcgacgagaaggaaagatcggggtttgaaggaaagagaccgatccgattcgaactcgaatcaaacacattccaaaccgatttagccgatgtttccaaaggggaaaaggtggaggagatcccggagatcgtttcccctcaatcaatttcaccagaaacggaaaggaacggccggatttggaaggagacggcggcgcttgcgctagggtttcgggcggcggcggcggcgcgaggaggaagacaggcctgacagacgggccccacctgtcagcggctgagagagaagagtggcggctcggcggactgggccggactgggccgaggagggagagagatagagagagggagggttttgggccggctttcggcccaaagccaaaaaaaaaaaacctttttcaatttaaattattcatgaaatgcaattccatttattaaaaacacttccttagctcaaataaatcccagaaaaatctaggaattatagaattaagcaaagtatttaacaaaattttatctagcccaattttatattgagatttaacaaattaaaattagatcttctcttttaggcttttaaaatcatttctaataattccttttaaacaacaatttataatttaaggattttaaacaagaaaagcacttaacaattataattagatcattattgtcacgaccggaaataacccaacgggcgttccttacgtgcgtgtattattccttgtcctaggaggcaaggtacaccaaaagttgatacaattcagagtttaacaagcgaaagcgtaaatagttatttattacatgggcagcgacggcccagcacactcaaagacaacgaaaaacagcggaagactaaggcgacgaccacaggcgcttgacggcaggcacgagctagacaccaaagccttcatcctccaggggctcctcttctgggtttgggaaaaattgaacaagactgagtacaaccaccgtactcaacaagacacacccacaagtgcagcataattgcaaaggagtacaatggagttataatataggggttaggttttgcaataaacagcatttaaaagacccttagttgctcaaagctaaatttaaaacacgatcctagaactatttaatattattaatcaaggccgtgaacccacacgaacctgccttaacccaaggcctacgatgattcagaccgaactggcaacccgaccctgggtcccagctcgtcccaggccaacccaggccaaccattccacattttagttgttaagcaggttttaagaattaaaacactaacttgggtacattgctcggcttgcccataaccgagggcgcggctattcgaatagattatactctgatcagaggtgtacatctttacccataagacacatcttcctcacgtgtaatcacgtgccacataccaccacggtatacaggcggaagacgtgacatagttcccaacccatcctagccatagacaagagtaccgacccaatcccacctacggccggaacccccgggacaggcaggcaggactgagccccctagcagcaggacaccggccctgtgtcatgacatctcgactaccgggccgcagctcgtgtagccttcatttgccctggagatgtccatcgaacccccgacttcgtccatctccatccgtgtacttttgtttataaccagactgagccacaaactaagccttacccactagacatgtggaagtacggtagtgctttgcaacagaggcccgaagaccggtccttatatggccgaggtgctactatcaaaaccatgcaccccgagcccagcctaaaaccattttggggattttgaatagagggggcggtatgaatccaattccacaacaatccaacaaatccaatgtgtccaagtgatatgaatattaccacaatctagagttttaaaaccacctaatgttacctaattaatcagcgaagcatctacctaaaatcatactagtgataccacgagtagagtgtccactagttgggggttttgtttatcctagggtgaacaaggtaataataacaataacaataataataaggtcataacaaaggtaaataggcatggctaaataaaacagtgataacgcgggaatttaaataaagcgatgatgcaataatttaaatcaaaataatttcataaattgggattcaatatgttcaaggatgatgtgtcttgccttgctcgctttcccaaatgccggcttcaacttccacgaagagcggatcctccgaagctgcagcgtctacacgaccaacggaaaagaaaaggcttttactctaacaaactccatataaaaagcattaacaaagcacaaaaatgggttcttgacttcttaaggaaaaattagagacttgaacggtccaattccgagttcaaatggccaagttatagccatttgaagtttatatgctctttaaatgaatatttgcgaatttcttcatttaaattttaatttaaaattggatttattgcgtcagccgaggggaggggcacgcggaccgggtccacgggagtggggcccacgcggcagcctcacggtccacggtggaccgggtgcacgcggcttactccgaccggcgccgcgggccccacgcgtcagccgcacccgagggcgcgggcggctgacggccgggccccacgcggcagccgctcggtgcgcccgaaggcagccacggcggcgcggccggcgggaggcagcgccctcgccccgatggtcgccgccggcgaccaccggcacggcggagcagcggccgagagaggggagggaaagggggaaacgaaacggcggtccacggctcaccccgagtcgacggcgacgacgaaaacggcggccggagcggaggaaggcggcggcgcggctcgggtcgacggggtcgacggcgttccggcggtcggcgagcgaagcggaggggtggacgaggtcggcgaggatgcggcgaagccgaaggaggcggcgccggggcgggagatggtccggggcgacgacggcggcggaccggagctcggcggcgacggcggagagagagtgcgacggcgcgggctcgattctgacggggaggaagggcggtgtcgcgaccgggaaaattgccttttcccgaacgctagtgtattaatccccgtcccaggaaaagccggggtacaccacacaaacatgatataagagacacttctttattatatcgataatatttacattattacaaaggcacttaaggcctgacaatcaaaaataaacagcagcggactagcgggcctacggctccatcttcacaggcgctcaactggggtataagccaggactccacctaagacatcttctccaaagcttctcttactgaaggggggagaaagatagagcaagaatgagtacaaccacagtactcagcaagccacaccggagatgcataattaatgcaagggagtacaaggggataataagataggggttaagttttgcagtaaacagcatttaaaagtcacttagttgcccaaagccattttataaagacgatcctagagctacacagttttattaatcaaggccgtgaacccacacgaacctgccttaacccaaggcctacgatgattcagaccgaactggcaacccgaccctgggtcccagctcgtcccaagccaacccaggccaaccattccacattttagttgttgagcaaattttaagaattagaacactgacttgggtacattgctcggcttgcccataaccgagggcgcggctattcgaatagattatactctgatcagaggtgttcctcacgtgtaaccacgtgccacataccaccacggtatacggacggaagacgtgacatagtttccaacccatcctagccatagacaagagtaccgacccaatcctgcctacggccggaacccccgggacaggcaggcaggactgagccccaagcagcagcgcaccaaccctctgccacgacatctcgactaccgggccgcagctcgtgtagccttcatttgccctggagaatgtccatcgacccccgacttcatccatctccaatccgtgtacttttgtttaaaaccagactgagccacaaactaagccttacccactagacatgtggaagtacggtagtgctttgcaacagaggcccgagcttaatccttatagtggccggggtgctacttcccacaactggcatgcacccaaaccccaccgaaaacaggttttaggggttttgaaaggggaagagaggtgtatgtccaattccaccataaaccaacaattccatagtgtccaaatgatatgagaattcccaaagtctaaagttataaaatcacctaatgttgcctaattaaccagcgaagcatctacctaagttcatactagtggaaccataaatagagtacccactagttggggttttattttcctagggtgaacaaggtaataataacaatagcaataataatgtcttaacaacgataaataggcatggctaaataaaacagtgataacgcgggaatttaaataaagcggtaatgcaataatttaaatcaaaataattttataaactggggttcaatatgctcaaggatgatgtgacttgccttgctcgctttcccaaacaccggcttcaacttccacgaagagcggatcttccgaagctgcagcgtctacacgactaacgaaaaagaaaaggcttttactctactaaactccacataacagcagaaacaaagcacaaaaatgggttcttgacttcttaaggaaaaattagagacttgaacggtccaattccgagttcaaatggccaagttatggccatttgaagtttatatgctctttaaatggatatttgcgaatttcttcatttaaattttaattaaaaatcgggtttattgcgtcagccgagggagagggcgcgcggaccgggtccacgggagtggggcccacgcgtcagcctctcggtccacggtggaccgggagcacgcggctggcggcggccggcgccgtgggtcccacgcgtcagccgcacccgcgggcgcgggcggctgacggccgggcccacttggcagccgcgagggcgcgcccgaaggcagcctcgccggcacggccgacgggagggggacgcgcccgcgccccgatggtcaccgccggcgaccaccggcgcggcggagcggcacccgagagagaggagggaagggggaagcgaatggagcggtcttcggctcaccccggtcgacggcgacgacgggaacggcggccgaaacggaggaaggcggcggcgcggttcgggacgacgaggacgacggcgctccgacggtcggcgagcgaaacggaggagcggacggggtcgacgacgacgcggcgaagccgaaggaggcgacgccgagaggggaggaagtccggagcgacggcggcggcgaaccggaactcgtcggcgacggcggagagagaggaaagcggcgcgagcgcgattccgacggtgagagcgagcggcgaacggcggaaacggaggagagaggcacggggaacaattaaatagcgtcgggagagagggaaagcggccggaggagatggaaaccggcgcggagatctcggccgccattgattgcgccggcgaggatcgcgggcacaaaatcggacgaatccgagggagagagagaggggaaagtgggggaatcgggagagggaatcgcggggaatgattcccccctcattatggtgcgcggggacggcgggatgcggcggaatccgcggcggcggcggcgctagggcacgggcgagcggcgggagcggcgggaggaaggcgatgacaggtgggccccacccgtcagcgagggtggcgggcgggcccgcctgtcagcggcgcgcgcgcggggaggagccgatgggccgcgggggagaggagagagagggagggagagaattgggccgagccggcccaagaagggaagggggggaaagaagacttcttttagggtttttctttttataaaacctttttaactttgtttatttcttaataattattatttgtgctctgaaaattccactaaaatttgagggctccttttagaccaaggagaatttaacaaaaattctccgggccacatttgaatttttcttgtacgtattttagtgtttgccaatttctttccgaattttaattaattctattattccttttagaaaatgaattttaatttcgggatgaatttatcaggacgtgacaaatccaccccccttacaagaatctcgtccccgagattcgaggaggctagcaagaagataggttgggcggtcttctcttcttgtctgacttcttccgtcgcgtcttttataacaacttgcctagcaaaacttctctactctggactgcttggctcaatctcctgttgcagatggaatcttctcttcacctgacttgtccctggttgaacctttagctgacttcgactgggttgcggcacttgaagatggtgcttcagttccagaacttcgcatagttcatatttttggcgtcaacctcatagaagttacccatttcacgttatgcgtcgagatcagctcgtcattactaggataccatgcttgtcatcatgagcatatcatgcttgtcatttacttctaacctgccaccaactgcctcatattagctttcctagtctccgggtgataactacttctgctatttgatgcaagggtcgataactttgcctttgaattatgtttcccaagagaaccaacttatcccacttgacatactttgacgtcttcccaaatggctttactgctggatttgttgttgtctaatcattatcctgccaaatctgaggcttcgttgttagatgcgattttaatctgacctctgtagattatcttcgaacatatcacttggttcataactgggaatagctctcacgaacaagcaactcggattcactttctttacatttggttcacttcccactattctcttcatgttgtcatcatttagcattcaacatattcctttgcaccttccgccttgatgtgttctttctcgatggatcgattggtaggaaagtgcgttgagcgatactagtgcaagtgctttcattctagtagcatctgatacaaagcccaaggttgaaccgagctttagattccactgttcaggttttacttattgacttcttggtcatgtcacaaaagtttccatccttgtccccatagaagtacttctacctgtggtcatctctcttactcgtgaattcacctattttaatgacagggcaactgttgtagggttgtttgctatcgggagtcttccttgagtgacacaaatcatggttctcgttatcctttatcaatcacctttcgacctacttcttttcccagtaaccaaacatcttttccgatctcttccattaatcacctttcgacctttctcaaccaggtactcttcactccgggtgttgaggatgcttctggggcaatgaggtgcttgggcgtgctgtctttcagagaaaccttgaagtagttcgtcaaaagctagactgacgattgttgcctttgatccgaagagacacatctgaaactcttagtccaaacaaatgcctctttggttgatcacttgattttcttcgccatcaatcgctaggctatttgattcctaacagattatgggtttacggaaatgagaccctaggtctccctaatcaacaacaaaatgtgcacaactcacagcacttgcactcttaacatggatccttcataagcttatcaaactcattcattatctcatgtttctctgttattacatgattgacggggaacaactataaaacaaaagtatttgaacactgatataagagtattatggttgcttctgactagcgctaggcttatcaggtactgtatttgctccagtgaccacttggcgattggcatgtctgcttccttaacaggtactacagtttgtaacagacaataactttcttacgctcgggttcttcatcttgtacttgatttctttggctgctgtgcacgggcgggagggcggctcggcctggaggggggggtgcggcttgggccgggcaggccgggagggggggggagagacagcccgggagagagagggaggagggtgctgggccgaggggaagggggcccaagaggagggagagaaggagagggagagaaagagagggaggaatgggagacttcggccgcgggccgaggggagagagggaggactttgggccagacttggcccaaaggaggaaggagggttatttttaggtttttctttttaataaactttgttaattgtttttgttgcttaataattatttccggtgctataaaaattcaagtaaaatttgagggctccttttagaccaaggagaatttaacaaaaattctccgggccacatttgaatttttcttgcacgtattttagtgtttgccaatttcttttcgaattttaattaattctattattccttttagcgaatgatttttaattcgggatgaatttatcaggacgtgacaggagggtcctcagcagaaaagaaaaacaccaatgcgaaccgaagatgaagtccgtaagatgatcattaccagcacagaatggcctccaccaggaatgacaaaacgtcagagaagaaataccttccgaggtgcaccacagttgacagagcatcttttagctaatggaggtagagtgtctgatagtgaagattcagatcaagtctcctcagatgatgaagatgagaagtctccccaaggtttcaaccagaataaaatggaacgtaaggcatgctctcgttgtggagaaatcggtcatgttgccagctcgtgtgccactacatgcgttcattgtgaggaagaccatccacccgacaggtgtccaacgagcaggatcacttgtttcttttgtgaaggaactgatcatgtaccaaaagattgtcaattcagtttgctgctgacgaagaagatggccaaccaacccgccagttccaacggagagaagcatcaagatggatgaagtcgggggtcgatggacattctccagggcaaatgaaggctacacgagctgcggcccggtagtcgagatgtcatggcagagggttggtgccctgctgctagggtgctcagtcctgcctgcctgtcccgggtgtcccggccgtagggggattgggtcggtactcttgtctatggctaggatgggttggaaactatgtcacgtctttcgtctgtataccgtggtggtatgtggcacgtggttacacgtgaggaagatgtgtcttgtgggtaaagatgtacacctctgatcagagtaaaacctattcgaatagccgcgccctcggttatgggcaagccgagcaatgtacccaagttagtgttttaattcttaaaacttgcttaacaactaaaatatggaatggttggcctgggttggcttgggacgagctgggacccagggtcgggttgccagttcggtctgaatcatcgtaggccttgggttaaggcaggttcgtgtgggttcacggccttgattaataacattgtatagctctaggatcgtgtttacaaaatagcttgagcaactaaatgtctttaaatgctgtttacttcaaccctaacccctctatgttataattcccttgtactcccttgcatttattctgcacttgtgggtgtgtcttgttgagtacggtggttgtactcagtcttgctcaatttttcccaagcccagaagaggagctccttgaagatgaaggctttggtgtctagctcgtgcctgccgtcaagtgcctgtggtcgtcgccctagtcttccgctgtttctcgtttgtctttgtgtgtgctgggccttcgctgcccatgtaataaattaactatttacgcttccgcttgttaaactctgatttgtatcaacttttgctgtaccttgcctcctgggacaaggattaatgcacgcacgtaaggaatgcccgttgggttatttccggtcgtgacacaccatcacctgggacgagttttcatctgtattcaagagatcccatgttcccgcaggaatgatcacactgagaaaacgagagttccgctacctgaagcaagaagatttgaccgtcacagagtacctgcacgagttccatcgtttggctcactatgcaccagaagatgtggaaaatgatgaagacaaacaagagaagtatctccaggggttaaaagatgagatcacagtgcaactactcctagaggaatatgaagattttgagaaacttgtggacaaagccatacaactcgaaagtgagcataatcggatgaagaactgtaagagaaggattgtcagcatcccagtattcccatgtggtaaccaaagacagcgcacggagccacttcagatcaccggatcttctgttgcgcatcaagagtttccgccccaagaagatggacacaatgcagacaacaacattagcaatactaatgatgatgataccaccaacaaccatgcttcttgccccattagtgaccactcaaatcaagcgtgcaatgtcaacatcattcaccaaggtgtcgacgatagtatcaatgatggcacccaaaatgacaaccctagcaattgtgactctgagaaagactccaatggtgatagcaactatggtaccactgatgccaatgttagcaaggatttccaaccaccaattccaactccaagtcagaatgatcgtccccagacggatagctcagcaaagaagacgttgatttgctacaattgcaaaggaccagggcattactcgagggactgcctgcatccaaggcaaagtcgatctccacattaccgccaatttacacgaagcagacatcccaatcgtattgtggtcactggagcaaacgccgtacccgtgaggcctcgtgttaatcagaacccatagcagaaacaatgtgccgatgctaagcacctttccttttaggcagtgcttagtattcatgtaatgagggagaaatgtgtaatacagacaagttctatgagggttcttttggaagatgtggatatgtgattatgtgtataattgcttactgataaaggagacctagggtctcatttcagacgaactatgttctaacctcgagttaataaccaacctgttgatggaaaagaaaaccaattaaactgtgttgggttaaaaagccaatgagacagtagttggggataggagtttggatacgccttttacagatcaagataaggattgttggatgaaacccataagggtacccgccatgcctctacattgataagttcggatatacctgcaagcagttaagaagatccaggagacatcaatatttgagaacatagtagtcgatggttggtaattaatctatcaggtatcagaaaagggtcaaaggtgatatggcagaagaacaatttggatgctccccatctcgaggaagcactaaagatgatcatcggcaattaaaccctagtggcatagatacagatagcaagcaatgtatttccctgaaggtagtcagtgcagctttttgacgaaccacatcaaggtttcactgaaaggcagcaagccaaaggatctcatcgtccccagaagcgtccgcaatccacattaaagaataccacctgttagaggtaagccgaaagatgattgataaaagagattggcaaagatgttctctagcatgaaagaagtaggccgaaaggtgattgataaacagaaacatgctctgcatcgctcaaggaagacccttgattgtaattgccacgcaacagtcaccttgtcattaagtaagcaagatgacctaggtaaaagtgtttctaggaaggcaaagagtgaaatcttcaactcggtatcagatgctacacggagtgaaaagtgcaagcaccggttaccaggcaatgccatttcttgggagatgatccaatgggaaagaacacatcaaggttaaaggtgtaaaggaatacgttgaatactaactgaggacaacctgaagatgataatgggaagtaaactgaatgtaaagaaagtgaatccgagttgcttgttcgtgagagctattcccagttatgaatcaagtgatatgttcgaagataatctacagaggtcagattaaaatcacatctaacaacgaagcctcagatttgacaggataatgattagacaataacaaatccagcagtaaagccatttgggaagacgtcaaagcatatcaagtgggataagttggttctcttgggaagcataattcaaaggcaaagttatcgacccttgcatcaaatagcagaagtagctatcacccggagaccaggaaagctaatatgaggcagttggtggcgagttagaagtaaatgacaagcatggtattctcatgatgacaagcatggtatcttagtaatgacgagctgatctcgacgcatgacatgaagcgggtaacttgtatgaggttgacgccaaagatatgaatgataagaagttctagaaccgaagccccatcctcaaccaccgcagcctagtctgggtcagttagaagttcaaccagggacaagtcgggtgaagagaagattccatctgcaacaggagatcgagccaagcgttccagagtggagaagttttgttaggcaagttggttatagaagacggagcggaagaagtcagacaagaagagaagactgcccaacctatcttcatgctagcctcctcgaatctcggggacgagattcttgtaaggggggtggatttgtcacgtcctgataaattcatcccgaaataaaaatcattctctaaaaggaataatagaattaattaaaatttgaaaagaaattggcaaacattaaaatacgtacaagaaaaattcaaatgtgacccggagaatttttgttaaattctccttggtctaaaaggagccctcaaattttagtggaattctcagagcacaaataataattattaagaaataaacaatgttaaaataattttataaaaagaaaaaccctaaaaagtctttcccccccctttcccctcttgggccggctcggcccatccctttctctctctctcctcttccccgcggcccatccggcctcctccccgcgcgcgcgccgctgacgggtgggcccgcccgccaccctcgctgacgggtggggcccacctgtcatccctgtcctcccgccgctcccgccgcctcgcccgtgccctagcgccgccgccgccgcgaatcccgccgcctcccgccgtccacgcgcgcaataaagtgggggaaatattccccgtgattccctctctctttccccccatttctccctctctctcccgcgttcaaacgggcggatttgcccccgcaaatctcgccggcgccattgatggcggccgacctcccgcgccggtttcctcccttccccggccaccctctctcgcccccggctctatataaacactccccgtgcctctctccaccgtttccgccactcgccgctctctttccccgtcggaatcgagctcgcgccgtcgtcctctctctccgccgtcgccgccgagctccggttcaccgccgtcgttgccccggaccatctcccgcttcggcaccgcctccttcggcttcgccgcatcctcgccgacctcgtccacctctccgtttcggtcgccgaccgccggaacgccgccgtccccgtcgacccgagccgcgccgccgcctctctccgctccggtcgccgttcccatcgtcgccatcgatccggggtgagccatggaccgcccatttcgtttcccccttccctcccctctctcggccgccgctccgccgtgcctatggccgccgccggcgaccataggggcgcgggcgcgccgcctctcgtcggccgtgccggcgaggccgccttcgggcgcgccccgcggctgctaggtggggcccggccgtcagccgcccgcgcccccgggtgcggctgacgcgtgggacccacggcgccggccggcgcaagccgcgtgcacccggtccaccgtggaccgtgaggctgccgcgtgggccccactcccgtggacccggtccgcgcgcccctcccgtcgcctgatgcaataaatccgattttaaattaaaatttaaatgaagaaattcgtaaatatccatttaaagagcatataaacttcaaatggccataacttggccatttgaactcggaattggaccgttcaagtctctaatttttccttaagaagtcaagaacccatttttgtgctttgtttctgcttgttatatggagtttagtagagtaaaagccgtttcttttccgttggtcgtgtagacgctgcagctcggaagatccgctcttcgtggaagttgaagccggcgtttgggaaagcgagcaaggcaagtcacatcatccttgaacatattgaatcccagtttataaaattattttgatttaaattattgcatagtcgctttatttaaattcccgcgttatcactgttttatttagccatgcctatttacctttgttatgaccttattattattgttattgttattattaccttgttcaccctagattaaacaaaaccccaactagtggacactctactcatagtaccactagtataattttaggtagatgcttcgctgattaattaggtaacattaggcggttttacaactctagactttgggatattcatatcacctggacactttggaattgttggtttattgtggaattggattcacaccgccccctctattcaaaatccccaaaatggttttaggctgggctcggggtgcatggttttgatagtagcacctcagtcctgcctgcctgtcccggaggttctggccgtaggcgggattgggtcggtactcttgtctatggctaggatgggttgggaactatgtcacgtcttccgtccgtataccgtggtggtatgtggcacgtggttacacgtgaggaagatgtgtcttgtgggtaaagatgtacacctctgatcagagtataatctattcgaatagccgcgccctcggttatgggcaagccaagcaatgtacccaagttagtgtttgaattcttaaaatttgctcaacaactaaaatgtggaatggttggcctgggttggcttgggacgagctgggactcagggtcgggttgccagttcggtctgaatcatcgtaggccttgggttaaggcaggttcgtgagggttcacggccttgattaataatattgtgtagctctaggatcgtcttataaaatggctttgggcaactaagtgacttttaaatgctgttttctgcaaagcttaacccctatattattaccccttgtaccccctttgcattaatcatgcatctgccggtgtggctcgctgagtactgtggatgtactcattcttgctcaatcttttccctcttcagtaagagaagctttggagaagaagtcttaggtggagtcctggcttataccccagttgagcgcctgtgaagatgtagccgtaggcccgctagtccgctgctgtttatttttgattgtcaggccttaagtgcctttgtaataatgtaaatattatcgatataataaagatgtgccttttgtatcatgtttgttcggtgtaccccggcttttcctgggacggggattaatacactagcgttcgggaaaaggtaattttctcggtcgcgacaagctggtatcagagccatctcgactgtaggataagccaagtggataaaacctaaggacatattttctaaataaaactatttgcgaaagttccttttttctccttcccctaatgctatttgcaaaaggtttactcccttcttccttcttcggatttcaactagtactagatggtcaggtcagtgaagaagaagacatcgtcagttgtttgccgaagctccggaagactgcaggatccgctagcgaagtggaggaagcactgaagccagctgtgaagcaggagtgaagatcttgagaacccgtcacagaacctaagccaccctctagggtagagttgttagtcgtgtgtttccttgcttgtgtgtgtagcgcgtggtttgcatcagtgggttgtgatgtaaccatgctaggttgtttgcttaatcaacttgcagaataagcctaacatacatcataacagcaaaagacttagatctgttaaggtcctatccttagtttctaatctgtctctcccctttgttttccctctctccctctccaaacctttgcaacagatggctgacaatgagaaaggcaataaggtcagaagtcaggacatcggtacctcaagctcccgagtgaatgaagcaccagacaccagttgtgtgacactggtccaacacctgattaaccagaaccgattgcttatagagatactacagcagcatcagacgccaattctgaacctgagtcagatacaacctcaagtgcagttggaggcagtccaagcactcacaccacgagtcagcatgccgccagcatcccgaaggacccatggtgacgtgccacatgttgactcaaaagaagcaagtatcatttgttttatgtgtgatgagcaagggcactatgcaagggagttgtcgcgaccaagaaaattgccttttcccgaacgatagtgtaataatccccgtcccaggaaaagccggggtacaccacacaaacatgatataaaagacacatctttattatatcgataatatttacattattacaaaggcgcttcaggcctgacaatcaaaaataaacagcagcggactagcgggcctacggctccatcttcacaggcgctcaactggggtataagccaggactccacctaagacatcttctccaaagcttctcttactgaagaggggaaagattgagcaagaatgagtacaaccacagtactcagcaagccacaccggcagatgcatgattaatgcaagggagtacaaggggataataatataggggttaagttttgcagtaaacagcatttaaaagtcacttagttgcccaaagccattttataaagacgatcctagagctacacagtattattaaacaaggccgtgaaccctcacgaacctgccttaacccaaggcctatgatgattcagaccgaactggcaacccgaccctgggtcccagctcgtcccaagccaacccaggccaaccattccacattttagttgttgagcaaattttaagaattaaaacactgacttgggtacattgctcggcttgcccataaccgagggcgcggctattcgaatagattatactctgatcagaggtgtacatctttacccacaagacacatcttcctcacgtgcaaccacgtgccacataccaccacggtatacagacggaagacgtgacatagtttccaacccatcctagccatagacaagagtaccgacccaatcccgcctacagccggaacctccgggacaggcaggcaggactgagcccctagcagcagggcaccaaccctctgccatgacatctcgactaccgggccgcagctcgtgtagccttcatttgccctggagaatgtccatcgacccccgacttcatccatctccaatccgtgtacttttgtttataaccagactgagccacaaactaagccttacccactagacatgtggaagtacggtagtgctttgcaacagaggcccgagcttaatccttatagtggccggggtgctacttcccacaactggcatgcacccaaaccccaccgaaaacatgttttaggggttttgaaagaggaagagaggtgtatgtccaattccaccataaaccaacaattccatagtgtccaaatgatatgaatattcccaaagtctaaaattataaaaccacctaatgttgtcctattaatcagcgaagcatctacctaaattcatactagtggaaccatgaatagagtacccactagttggggttttgtttatcctagggtgaacaaggtaataataacagtagcaataataatgtcttaacaaaggtaaataggcatggctaaataaaacagtgataacgcgggaatttaaataaagcgatcatgcattaatttaaatcaaaataattttataaactgggattcaatatgctcaaggatgatgtgacttgccttgctcagagagaacggccttccgaaccttcggcgacaaccacgaaccacgcttcgggaacctccggaacgacgaaagctacgcgaagcacacaagcaaagctacaagcctataaagaagcaataacaatacataaaaagaaagcacagggttctttaggttatatcaaacattaagagacttgaacgggtcgattcggagctcgcatgaccaagatatgatcatccgaagtttaatgctgttatatggagatttgcggattattataattaagctttgcaactataaaacaggtgtaagcgctagcctggaaaagacaggaaggctgcgccgttgacatgcggaccccacatgtcaacctaaaggaccgcggtagaccgggtacacagagacggtcctcgggtcgacggaagcagaccccgtgtgtcaaccgaggcgagtggccgacaaacggactccactaaacaccacacggcctgcacacgtggaaatcacgcggctaccgagcgggcacactaacacggacactacacggtcaccacccgcacgcgtgaacgactaccgacaccggtacacgggtaccggggccgacaaccgcacaacgagcacgggcgacaccgaaaggacgaggacggggaagcgagaggacggatccttaccaccacgcgacgaggcgcgggaacgacaacgacgaacgggcgcggcggagacagacgggcacaacggagacgaacggcgaggggacggcttcggcggcgatccttggacgaaggcgagacgcggccggcacaaggcttgacgacgcggagccgaggacgaagacgaggacggggctgcagcggctcgcttgacgaacgcggacgacggacgagaacggctcgacggagggacgaacgccacgacgatcgggaacgacgagaggacgaggacgacgacgaccggggccggcgagggggcgatgagggacagccagcagtggctgcacggagacggggacgacgtggaacacgccgctgcgatgacgatgacggaggcggcaccgcgagacgacgagccgggcgaccgacgggacgtcgacgacgagaacgaacggagacaacgacgatggaccgcggaggggttcggtcgaaggggaggcgaggccgagggcgaccttgccgctgcgatgccggaggtggtggtgccgcggctgaccggtaaacaagcgaggaggaacgggcggccggaggactccggcgaggcgggtggaggggttggtggcgacacggcggtgttccggcgaaaccgaggagcagctggaggtgaggacaacgctgcgacgtcgacggaggagatggcgacgtcgatcggcgtaccggcgacgtacaggagccgaccggagaccgggaggtactggacgccgacgacgaggccactccggcgagcttcgggcgaggaggaggtgatgccggggaaggaggcgatgccgcggtgtcgaaggaggagacggcggcgtcgatcggcgcaccggcgacgtacaggagccggctggagggagtacagtggcaccaatgccactggttgccggcgggggcaccgttccggcgatttccccacaaatcggaggtggcgccggggaagaggaggcggctgcgacgctggaggaggcgacggcacggccggccggtgcgcgggcgaggcggcacaggcggctggaggcggccggcggcgtgggagagagaggagggcggcggggagatggctagggaccacggggaggctcgggagggggctaaaacgagagaacgggggatgaggatcccattttatatgagaaaagagggagccggccacgggggagggcggaacggcgacgggaatggcggccggcggccatggttggtggccgggaaaagcgcggccgttcccgacgattgggggcgccattcaagagggaaattggggggaattgaagaggattcaatggggtttaatttcccctaatcaatttggaaagaagggcattgattcgcgtggatttaagggaggaacggcgcttggtttccggggagagagagagagagaaggccggctgggggaggaagacgatgacgacctggcgcgtgggccccacgcggtcaggcggcgtcgtcagcgcgcgcacgcgcgcggcacgggcgggagggcggctcggcctggaggggggggtgcggcttgggccgggcaggccgggagggggggggagagacagcccgggagagagagggaggagggtgctgggccgaggggaagggggcccaagaggagggagagaaggagagggagagaaagagagggaggaatgggagacttcggccgcgggccgaggggagagagggaggactttgggccagacttggcccaaaggaggaaggagggttatttttaggtttttctttttaataaactttgttaattgtttttgttgcttaataattatttccggtgctataaaaattcaagtaaaatttgagggctccttttagaccaaggagaatttaacaaaaattctccgggccacatttgaatttttcttgcacgtattttagtgtttgccaatttcttttcgaattttaattaattctattattccttttagcgaatgatttttaattcgggatgaatttatcaggacgtgacaggagggtcctcagcagaaaagaaaaacaccaatgcgaactgaagatgaagtccgtaagatgatcattaccagcacagaatggcctccaccaggaatgacaaaacgtcagagaagaaataccttccgaggtgcaccacagttgacagagcatcttttagctaatggaggtagagtgtctgatagtgaagattcagatcaagtctcctcagatgatgaagatgagaagtctccccaaggtttcaaccagaataaaatggaacgtaaggcatgctctcgttgtggagaaatcggtcatgttgccagctcgtgtgccactacatgcgttcattgtgaggaagaccatccacccgacaggtgtccaacgagcaggatcacttgtttcttttgtgaaggaactgatcatgtaccaaaagattgtcaattcagtttgctgctgacgaagaagatggccaaccaacccgccagttccaacggagagaagcatcaaggcaacacaaatcctcgccaagattacagtttcagcctaactccagtgccaggacagaggaatcaaaatgagaaaagaaaatgccgagtccgggaagatatatgttgcttcaattgtcaaggaatgggtcatttcgccgacaagtacccaaaaccgagagacatagctgccagcacgtcagtccacgcaactccctgcaatcagaagcttgctcctcagcgaattgtcatccatgcatcccgaagcagtcctatagcccgcgttgcaacagctccaactccagcgagtgcattaccacaaggtgtcaatgctcaatttcagccccagccaccagttgacaagacagaggccagtatcggcattttacctttggatgttccagcacagcagccaagaaatcaagtacaagatgaagaacccaagccaatgggaatgagaaaagcatcaacgaaacctcaccagagctaatccaaattgtggttaaccgaaccaacatgttggcaacagcctttcaactattacagaattggaacaacccagcaggggcaaccaacgttcaagtacctacagtccagcaacagtgcaagttatcagaatttctcaaaactgagactccaacctttgccattgccgtcgaacctatggaagccagtgattggttgcgcacagtcgagaagaagctggggttgattcagtgcacagaccaggagcgggttgtcttcgcaactcatcagttggttggactggcttcagaatggtgggatagctacgaagcatcacggccagaaggacacaccatcacctgggacgagttttcatctgtattcaagagatcccatgttcccgcaggaatgatcacactgagaaaacgagagttccgctacctgaagcaagaagatttgaccgtcacagagtacctgcacgagttccatcgtttggctcactatgcaccagaagatgtggaaaatgatgaagacaaacaagagaagtatctccaggggttaaaagatgagatcacagtgcaactactcctagaggaatatgaagattttgagaaacttgtggacaaagccatacaactcgaaagtgagcataatcggatgaagaactgtaagagaaggattgtcagcatcccagtattcccatgtggtaaccaaagacagcgcacggagccacttcagatcaccggatcttctgttgcgcatcaagagtttctgccccaagaagatggacacaatgcagacaacaacattagcaatactaatgatgatgataccaccaacaaccatgcttcttgccccattagtgaccactcaaatcaagcgtgcaatgtcaacatcattcaccaaggtgtcgacgatagtatcaatgatggcacccaaaatgacaaccctagcaattgtgactctgagaaagactccaatggtgatagcaactatggtaccactgatgccaatgttagcaaggatttccaaccaccaattccaactccaagtcagaatgatcgtccccagacggatagctcagcaaagaagacgttgatttgctacaattgcaaaggaccagggcattactcgagggactgcctgcaaccaaggcaaagtcgatctccacattaccgccaatttacacgaagcagacatcccaatcgtattgtggtcactggagcaaacgccgtacccgtgaggcctcgtgttaatcagaacccatagcagaaacaatgtgccaatgctaagcaccttttcttttaggcagtgcttagtattcatgtaatgagggagaaatgtgtaatacagacaagttctatgagggttcttttggaagatgtggatatgtgattatgtgtataattgcttactgataaaggagacctagggtctcatttcagacgaactatgttctaacctcgagttaataaccaacctgttgatggaaaagaaaaccaattaaactgtgttgggttaaaaagccaatgagacagtagttggggataggagtttggatacgccttttacagatcaagataaggattgttggatgaaacccataagggtacccgccatgcctctacattgataagttcggatatacctgcaagcagttaagaagatccaggagacatcaatatttgagaacatagtagtcgatggttggtaattaatctatcaggtatcagaaaagggtcaaaggtgatatggcagaagaacaatttggatgctccccatctcgaggaagcactaaagatgatcatcggcaattaaaccctagtggcatagatacagatagcaagcaatgtatttccctgaaggtagtcagtgcagctttttgacgaaccacatcaaggtttcactgaaaggcagcaagccaaaggatctcatcgtccccagaagcgtccgcaatccacattaaagaataccacctgttagaggtaagccgaaagatgattgataaaagagattggcaaagatgttctctagcatgaaagaagtaggccgaaaggtgattgataaacagaaacatgctctgcatcgctcaaggaagacccctgattgtaattgccacgcaacagtcaccttgtcattaagtaagcaagatgacctaggtaaaagtgtttctaggaaggcaaagagtgaaatcttcaactcggtatcagatgctacacggagtgaaaagtgcaagcaccggttaccaggcaatgccatttcttgggagatgatccaatgggaaagaacacatcaaggttaaaggtgtaaaggaatacgttgaatactaactgaggacaacctgaagatgataatgggaagtaaactgaatgtaaagaaagtgaatccgagttgcttgttcgtgagactattcccagttatgaatcaagtgatatgttcgaagataatctacagaggtcagattaaaatcacatctaacaacgaagcctcagatttgacaggataatgattagacaataacaaatccagcagtaaagccatttgggaagacgtcaaagcatatcaagtgggataagttggttctcttgggaagcataattcaaaggcaaagttatcgacccttgcatcaaatagcagaagtagctatcacccggagaccaggaaagctaatatgaggcagttggtggcaagttagaagtaaatgacaagcatggtattctcatgatgacaagcatggtatcttagtaatgacgagctgatctcgacgcatgacatgaagcgggtaacttgtatgaggttgacgccaaagatatgaatgataagaagttctagaaccgaagccccatcctcaaccaccgcagcctagtctgggtcagttagaagttcaaccagggacaagtcgggtgaagagaagattccatctgcaacaggagatcgagccaagcgttccagagtggagaagttttgttaggcaagttggttatagaagacggagcggaagaagtcagacaagaagagaagaccgcccaacctatcttcatgctagcctcctcgaatctcggggacgagattcttgtaaggggggtggatttgtcacgtcctgataaattcatcccgaaataaaaatcattctctaaaaggaataatagaattaattaaaatttgaaaagaaattggcaaacattaaaatacgtacaagaaaaattcaaatgtgacccggagaatttttgttaaattctccttggtctaaaaggagccctcaaattttagtggaattctcagagcacaaataataattattaagaaataaacaaagttaaaatgattttataaaaagaaaaaccctaaaaagtctttcccccccttttcccctcttgggccggctcggcccatccctttatctctctctcctcttccccgcggcccatccggcctcctccccgcgcgcgcgccgctgacgggtgggcccgcccgccaccctcgctgacgggtggggcccacctgtcatccctgtcctcccgccgctcccgccgcctcgcccgtgccctagcgccgccgccgccgcgaatcccgccgcctcccgccgtccacgcgcacaataaagtggggggaaatattccccgtgattccctctctctttccccccatttctccctctctctcccgcgttcaaacgggcggatttgcccccgcaaatctcgccggcgccattgatggcggccgacctcccgcgccggtttcctcccttccccggccaccctctctcgcccccggctctatataaacactccccgtgcctctctccaccgtttccgccactcgccgctctctttccccgtcggaatcgagctcgcgccgtcgtcctctctctccgccgtcaccgccgagctccggttcgccgccgtcgttgccccggaccatctcccgcttcggcaccgcctccttcggcttcgccgcatcctcgccgacctcgtccacctctccctttcggtcgccgaccgccggaacgctgccgtccccgtcgacccgagccgcgccgccgcctctctccgctccggtcgccgttcccgtcgtcgccatcgatccggggtgagccatggaccgcccatttcgtttcccccttcccacccctctctcggccgccgctccgccgtgcctatggccgccgccggcgaccataggggcgcgggcgcgccgcctcccgtcggccgtgccggcgaggccgccttcgggcgcgccccgcggctgccaagtgggcccggccgtcagccgcccgcgcccgcgggtgcggctgacgcgtgggacccacggcgccgaccgccgccagccgcgtgctcccggtccaccgtggaccgagaggctgacgcgtgggccccactcccgtggacccggtccgcgcgccctctccctcggctgacgcaataaacccgattttttaattaaaatttaaatgaagaaattcgcaaatatccatttaaagagcatataaacttcaaatggccatatcttggccatttgaactcggaattggaccgttcaagtctctaatttttccttaagaagtcaagaacccatttttgtgctttgttcctgcttgttgtatggagtttattagagtaaaagccttttcttttccgttggtcgtgtagacgctgcagcttcggaagatccgctcttcgtggaagttgaagccggcgtttgggaaagcgagcaaggcaagtcacatcatccttgaacatattgaatcccagtttatcaaattattttgatttaaattactgcattattgctttatttaaattcccgcgttatcactgttttatttagccatgcctatttacctttgttaatacattattattgttattgttattattaccttgttcaccctaggaaaataaaaaccccaactagtgggtactctattcctggttccactagtatgaatttaggtagatgcttcgctgattaattaggcaacattaggtggttttataactgtagactttgggaattctcatatcatttggacactatggaattgttggattatggtggaattggacatacacctctcttcctctttcaaaacccctaaaacctgttttcggtggggtttgggtgcatgccagttgtgggaagtagcaccccggccactataaggattaagctcgggcctctgttgcaaagcactaccgtactaaccacatgtctaatgggtaaggcttaactcggtgctcaggctagtcctgaacaaaaggacacggatagagatggatgaagtcgttgcgacgatggatatctctgaggcaaatgaaggctacgcgagctgcggctcggtaatcgagatgtctaggcaaatgaagactacacgggtcggtgcccgttagtcgagatgccatggcactggactagtacgtgggtggtctcacccctatgtgtgtggcgcacccggtctagatcttgttgctaggggctcaaccctggcctgcctgtcccgggataccggccgtaggcagggttgggtcggtacttttgttcacggctaggatgggtgaatggttatgtcacatctttacgacgggttccaaggccatggaatgcggagtaaagatgtgtcttgtgggtaaagatgtacacctctgatcagagtaaatctattcgaatagccgagccctcggatatgggcaagccgagcaatgtacccaagtcagtgttttaattcttaaaatttgctcaacaactaaaatatggaatggttggcctgggttggcttgggacgagctgggacccaggtcgggttgccagttcggtccgaatcatcgtaggccttgggttaaggcaggttcgtgagggttcacggccttgtttaataatactgtgtagctctaggatcgtctttacaaaatggctttgggcaactaagtgacttttaaatgctgtttactgcaaaacttaatccctatattattattcccttgtacctcccttgcattaatcatgcatctgccggtgtggcttgctgagtactgtggttgtactcattcttgctcaatccttcccctcttcagtaagagaagctttggagaagatgtcttagggggagtcctggcttataccccagttgagcgcctgtgaagatggagccgtaggcccgctagtccgctgctgtttatttttgattgtcaggccttaagtgcctttgtaataatgtaaatattgtcgatataataaagatgtgtcttttatatcatgtttgtgtggtgtaccccggcttttcctgggacagggattaatacactagcgttcgggaaaaggcaattttcccggtcgcgacaagctggtatcagagccatctcgactgtaggataagccaagtggataaaacccaaggacatattttataaataaaaattatttgcgaaagttcctttttctccttcccctaatgctatttgcaaaaggtttactccgttcttccttcttcggatttcaactagtactagatggtcaggtcagtgaagaagaagacatcgtcagttgttcgccgaagctccggaagactgcaggatctgctagtgaagtggaggaagcagtgaagccagctgtgaagcaggagtgaagatcttggagaacccgtcgcagaacctaagccaccctctagggtagagtcgttagtcgtgtgtttccttgtttgtgtgtgtagcgcgtggtttgcatcagtggggtgtgatgtaaccatgctaggttgtttgcttaatcaacttgcagaataggcctaacatacatcataacagcaaaagacttagatctgttaaggtcctatccttagtttctaatctgtctctcccctttgttttccctctctccctatccaaacctttgcaacagatggctgacaatgagaaaggcaataaggtcagaagtcaggacattggtacctcaagctctcgagtgaatgaagcaccagacaccagttgtgtggcagtggtccaacacctgattaaccagaacaaattgcttatagagatactacagcagcatcggatgccaattttgaacccgagtcagatacaacctcaagtgcagttggaggcagtccaagcactcacaccacaagtcagcgcaccgccaacatcccagaaggcccctcatgccatgccacatgttgacccaaaagaagcaagtatcatctgttttatgtgtgatgagcaagggcactatgcaaggaactgtcctcagcagaaaagaaaagcaccaatgcgaaccgaagatgaagtccgtaagatgatcattaccagcacagaatggcctccaccaggaatgacaaaatgtcagagaagaaattcctcccgaggtgcacaacagttgacagagcatcttttagctaatggaggtagagtgtctggtagtgaagattcagatcaagtctcctcagatgatgaagatgagaagtctccccaaggttttaaccagaataaaatagaacttaaggcatgctctcgttgtggagaaatcggtcatgttgccagctcgtgtgcctctacatgcgttcattgtgaggaagaccatccacccgataggtgtccaacgagcaggatcacttgtttcttttgtgaaggaactgatcatgtaccaaaagattgtcgattcagttttctgctgacgaagaagatggccaaccaacccgtcagttccaacggagagaagcatcaaggaaacacaaatcctcgccaagattacagtttcagcctaactccagtgccaggacagaggaaacaaaatgagaaaagaaaatgccgagtccgggaagatatctgttgcttcaattgtcaaggaatgggtcatttcgccgacaagtgcccaaaaccgagaaacgtagctgccagcacgtcagtccacgcaaacccccgcaatcagaagcttgctcctcaacgaattgtcatccatgcatcccgaagcagtcctatagcccgcgttgcaacagctccaattccaatgagtgcactaccacaaggtgtcaatgctcaatttcagccccagccaccagctgacaagacagaggccagtatctgcgttgtacctttggaagttccaatacagcagctgagaaatcaagtacaagatgaagaacccgagtgtaagaaagttattgtttgttacaactgcactgaagaagggcattactccaaaaactgtccccaaccaaggcaaaatcgacctccacattaccgccaatttacacgaagcagacattccaatcgtattgtggtcactggagcaaacgccgtacccgtaaggcctcgtgttaatcagaacccatagcagaaacaatgcaccaatgctcctcctgctgcacctgactcggcaataaatcatagcaaccattctctgcatcgacagcctcagcaaagaattgtcgtagatggaagaagttgtgtctctccccgacctactccaggccgagccaagagcaatcaacctccggagggcgataccaagcagaagaccgtcatccgcttcaaccagcaatcagaaggaagcttctcctgtgaatgatagcattatgtagtcctgtcacatcatcacagaaccaatcaaggatgcagtcactagaacaatgccagctatatctctccagaatcaaaatgagcagccatgtttgtggttttcagttcgctacttatcatggtgtaatcgaaagtttgcagcaaccatgtaatacataaatatattcatgtctataaacagtgagcttgctatgcttgtggatgattcacgttgagaatacaatgtaccgatgttaagcaccgtccctttttgtttaaggcagtgcctcgtattcatgtaatgagggagaaatgtgtaatacagacaagttccaggaggattcgtttgaaagatgcggatatatgatcatgtgtataattgtttactgacaaaggagacctagggtctcgtgtcagaggaactatattctaacctcgagttaataaccaacctgtggatggaaaagaaaaacaattaaactgtgttgggttaaaaagccaacgagacagtagttgaggataggagtttggatacgccttttacagatcaagataaggattgttggaggaaacccctaagggtacccgccatgcctctacattgataagatcggatatacctgccaacagttaaggagatccaggagacatcaatatttgagaacataatagtcgttggttggtaattagtttatccggaatcagaaaaaggtcaaaggtgatgtggcagaagaacaatttggatgctccccatctcgaggaagcactaaagatgaccatcggcaattaaaccctagtggtatagatacagatagcaggcaatgtatttccctgaaggtagtcagtgcagcttttgacgaaccacatcaaggttccacggaaaggcagcaagccaaaggacctcatcatccccagaagcgtccgcaatccacattaaagaataccacctgttagagataagccgaaagaagattgataaaagagattggcaaagatgttctctagcatgaaagaagtaggccgaaaggtgattgataaacagaaacatgctctgcatcgctcacggaagacccctgattgtaattgccccgcaacagtcaccttgtcattaagtaagcaagatgacctaggtaaaagtgtttctatgaaggcaaagagtgaaatcttccactcggtatcagatgctacacggagtgaaaaatgcaagcaccggttaccaggcaacgccacgtcctgggagatgatccaacgggaaagaactcatcaaggttaaaggtgtaaaggaatacgttgagtgctaactgatgacaacatgaagagaatagcggaaagtaaactgaacataaagaaagtgaatctgagttgcttgttcgtgggagctattcccagttatgaaccaagtgatatgttcgaagatagtctacagaggtcagtttaaaatcacatgtaacagcgaagcctcagatttggcaggataatgattagacaataacaaatccagcagtaaagccatttgggaagacgtcaaagtatatcaagtaggataagttggctctcttgggaagcataattcaaaggtaaagttatcgacccttgcatcaaatagcagaagtagctatcacccggagaccagggaagctaatatgaggcagttggtggcgagttagaagcaaatgacaagcatggtatcttagtaatgacgagctgatctcgacacatgacatgaagcgggtaacttgtatgaggttgactccaaagatatgaactatgcgaagttctggaactgaagccccatcttcaagtgccgcaacccagtcgaagtcagctaaaggttcaaccctggttcgagtcaggtgaaaagaagattccacctgcaacaggagatcgagccaagcagtccagagtggagaagctttgttaggcaagtttgttatagaaagcggagcggaagaagtcagacaagaagagaagaccgcccaacctatcttcatgctagcctcctcgaatctcggggacgagattcttgtaaggggggtggatttgtcacgtcctgataaattcatcccgaaataaaaatcattttctaaaaggaataatagaattaattaaaaattcgaaaagaaattggcaaaccctaaaatacgtacaagaaaaattcaaatgtggcccagagaatttttgttaaattctccttggtctaaaaggagccctcaaattttagtggaattttcagagcacgaataataattattaagaaataaacaaagttgaaaaggttttataaaaagaaaaatccctaaaagtcttcttttccccccccttcctcttttgggccggctcggcccaactctccctccctctctctcctctcccccgcggcccatcggcctcctccccagcgcgcgcgccgctgacaggcgggcccgcccgccgccctcgctgacgggtggggcccacctgtcatcgccttcctcccgccgctcccgccgctcgcccgtgccctagcgccgccgccgccgcggattccgccgcatcccgccgtccccgcgcgccataatgaggggggaatcattccccgcgattccctctctctttccccccccgtttttccctctctctctccctcggattcgtccggaatcgctcccgcaaacctcgccggcgccatcaatggcggccgagatctccgcgcccgtttcctccctctccggccgcgctctacccctcccgacgctatataagcgttccccgtgctctccccctccgtttccgccactcgccgtctctcctccccgtcggaatcgagcccgcaccgtcgcaccttctctccgccgtcgccgccgagctccggttcgccgccgtcgtcgctccggacctcctccccactcggcgtcacctccatcggcttcgccgcgtccccgtcgacctcggccacccctccgcttcgctcgccgaccgccggagcaccgtcgccctcgccgtcccgaaccgcgccgacgccttcctccgcttcggccgccgttcccgtcgtcgccgtcgacccggggtgagccgaagaccgccctttcgcttccctctcctctccgctctctcgggcgccgctccgccgcgccggtggtcgccggcggtgaccatcggggcgcggtcgtgccgcctcccgtcggccgtgccggcgaggccgccttcgggcgcgccctcgcggctgccaagtgggcccggccgtcagccgcccgcgcccgcgggtgcggctgacgcgtgggacccacggcgccgaccgccgccagccgcgtgctctcggtccaccgtggaccgagaggctgacgcgtgggccccactcccgtggacccggtccgcgcgccctctccctcggctgacgcaataaacccgattttttaattaaaatttaaatgaagaaattcgcaaatatccatttaaagagcatataaacttcaaatggccatatcttggccatttgaactcggaattggaccgttcaagtctctaatttttccttaagaagtcaagaacccatttttgtgctttgttcctgcttgttgtatggagtttattagagtaaaagtcttttcttttccgttggtcgtgtagacgctgcagcttcggaagatccgctcttcgtgaaagttgaagccggcgtttgggaaagcgagcaaggcaagtcacatcatacttgaacatattgaatcccagtttatcaaattattttgatttaaattactgcattattgctttatttaaattcccgcgttatcactgttttatttagccatgcctatttacctttgttaatacattattattgttattgttattattaccttgttcaccctaggaaaataaaaaccccaactagtgggtactctattcctggttccactagtatgaatttaggtagatgcttcgctgattaattaggcaacattaggtggttttatgactttagactttgggaattctcatatcatttggacactatggaattgtttgattatggtggaattggacatacacctctcttcctctttcaaaacccctaaaacctgttttcggtggggtttgggtgcatgccagttgtgggaagtagcaccccggccactataaggattaagctcgggcctctgttgcaaagcactaccgtactaaccacatgtctaatgggtaaggcttaactcggtgctcaggctagtcctgaacaaaaggacacggatagagatggatgaagtcgttgcgacgatggatatctctgaggcaaatgaaggctacgcgagctgcggctcggtaatcgagatgtctaggcaaatgaagactacacgggtcggtgcccgttagtcgagatgccatggcactggactagtacgcgggtggtctcacccctatgtgtgtggcgcacccggtctagatcttgttgctaggggctcaaccctggcctgcctgtcccgggataccggccgtaggcagggttgggtcggtacttttgttcacggctaggatgggtgaagggttatgtcacatctttacgacgggttccaaggccatggaatgcggagtaaagatgtgtcttgtgggtaaagatgtacacctctgatcagagtaaatctattcgaatagccgagccctcggatatgggcaagccgagcaatgtacccaagtcagtgttttaattcttaaaatttgctcaacaactaaaatatggaatggttggcctgggttggcttgggacgagctgggacccaggtcgggttgccagttcggtccgaatcatcgtaggccttgggttaaggcaggttcgtgagggttcacggccttgtttaataatactgtgtagctctaggatcgtctttacaaaatggctttgggcaactaagtgacttttaaatgctgtttactgcaaaacttaatccctatattattattcccttgtacctcccttgcattaatcatgcatctgccggtgtggcttgctgagtactgtggttgtactcattcttgctcaatccttcccctcttcagtaagagaagctttggagaagatgtcttagggggagtcctggcttataccccagttgagcgcctgtgaagatggagccgtaggcccgctagtccgctgctgtttatttttgattgtcaggccttaagtgcctttgtaataatgtaaatattgtcgatataataaagatgtgtcttttatatcatgtttgtgtggtgtaccccggcttttcctgggacggggattaatacactagcgttcgggaaaaggcaattttcccggtcgcgacagccgctttccaatccggccgctcctttccgtttccggctgaattgatagaggggaaatgatcttcgggatctcctctaccttttctcctttggaaacttcggctaaatcggtttggaaatcgatggattcgagttcgaatcggatcggctttcctctctccaagccgcgagtttccttcgccgttgccgtcgccgtgggcctccgccgtcgcctccgagcccctttaaaaggacccccggtgtctcctctactcgccgccaccctcgccttcgcctctcgtcgccggagtagccctagcgccgtgtgccctagctttgccttcgccgccgccgcttcagccgtgcgccgccgtcgttccagccgtcgccgtcgctcgggaagaccgccgtcgtcatcgccaagtcgccgccgtccccgtccgccccttcgcagccgtcggaacccgccggagcttcgtcgccgtcgacaacccgaaggtagccgccgcttccttctcgtcgccgtcgtcgtccgttccttctccgccgccgttttggtcaccggtgtgttcgccgtgttgtcctctacgtgctggtgccctccgttggtgccgtggtgccgccgttcgccggtgagcgtgcgccgcccgagccgtctgcctcgccgagccgccgccgccgtcggtgacgtcattgctggcgtcatcaaggccgtccgccgtgaaccgccgtggacccgatcgatctcggccgtccgatttggatcggatcaatctcggccgtccgttcgtgtgaaccgccgcccgtgcgcccggtccaccaaaccctagcccgctgacgcaataatccctttttccttttcaaaaataattcattattgcgtcataattcaattttaatcgatttaagtgttttaatccgatttaatctttaaaaattcataactaattcatcttagctccgatttagttggttcaagtctctaaatttttctaaaattaagatctacacattaaaaatatccacatgtactgttcatgcttgtttatgtgctgttttggtgattttgcttctttttgcttagattccgtcgtttccggagagtccgttttcgcgaaagaagagtttgaagagttccaaggccagcaaggcaagtcacacagatcccaaacaaccctttgagcatgttgatcctatttaaagctattgtttctattcaactattgcatctattttcgaatgtcattgggtggaattgacctattctttgttatggcccttttgtacattgattaccttattccttgataccttgggttatattaatttgactagttgagctttatttatattggttcaactagatattagatataattgcttagccctgcttagaaacattagtacacttatgggataactaatgatttactattatttcatgatggcttaatgatagttcacgatggtcgatcgtgattagttaattaattaatgtgccaactaaaacctggtaatggtgggttgtgagcacatggttttgatggtcgtgctcatgacaattaaggaccggttcacgagtttcggttgtgaaacatttatcgtgccaaccacaagccagcatgggcaacggctttatcttttgtatagcatggttcattgcggggcaccagactgagaagtggcggagataagcccacgggggtcgctggggagtccatgccttgttttataagggggtgattatgatccaggaaggtgcgctgcagtggattgtgttatgcgaggggtattgtcacaactcctttccgagataccgtggtggtattgaggcacatggtgacatgatgtggggttgtgtcttgtgggtacagtggtacacctctgatcagagtaaaactattcgaatagccgtgcccgcggttatgggcgggtctaacaatgtctttcgtgattagtctcacacctctcatcatagtaaaagatgctataactggtaataatttgattagctcctggtttggaatggtacattcctggtttggagatagaactgtgcagccggggtggttgttcagaatggttgggcctatacaacagggtatgttgtatagcgttggattaatattgtttaattacttaactgttttattaaattctcaaatgtttgctaaatgctgcttttgcaaatgcaaccctattatgccatcctttgttatcctgtgcacttgcatatttgctgcgtggcttgctgagtatgtcatatactcaccttgcaatcattcatcagaggaagagttctacaatgaggctgatggtgtggaggattaggtgtagccttggtcaagctgcctgtggagtggagccgtctgcgccgtttatttattttccgctgcttagaactttattgattgagaggaactatctacctctgtaatgacattttattcgcttattaattagagtaatatttgtactctattatcaatttgttattgtgtgcctcggctgattcctggacgagggttcacacacatgtaagcgtttggaattttggatagaaattccgggcgtgacacatgtgaggaagatgtgtcttgtgggtaaagatgtacacctctgatcagagtataatctattcgaatagccgcgccctctgttatgggcaagcaaagcaatgtacccaagttagtgttttaattcttaaaatttgctcaacaactaaaatgtggaatggttggcctgggttggcttgggacgagctgggactcagggtcgggttgctagttcggtctgaatcatcgtaggtcttgggttaaggcaggttcgtgagggttcacggccttgattaataatattgtgtagctctaggatcgtcttataaaatggctttgggcaactaagtgacttttaaatgctgttttctacaaagcttaacccctatattattaccccttgtaccccctttgcattaatcatgcatctgccggtgtggctcgctgagtactgtggatgtactcattcttgctcaatcttttccctcttcagtaagagaagctttggagaagaagtcttaggtggagtcctggcttataccccagttgagcgcctgtgaagatggagccgtaggcccgctagtccgctgctgtttatttttgattgtcaggccttaagtgcctttgtaataatgtaaatattatcgatataataaagatgtgccttttgtatcatgtttgttcggtgtaccccggcttttcctgggacggggattaatacactagcgttcgggaaaaggtaattttctcggtcgcgacaatgtggataccccaagacaacgcacatgccccgcagctccaaagcgaagccagtcaagtccagtccacgacgggtgatgctgccggccatctacaaacaaaacaaaatagaaaagcaacattttaaagattagattttgacaataaatgaagcagcaggacagagaaagactagaggattttcacaaataagaaaggatttttatttcgaaaatatcgctaaggcttgggatctacggctcgtcctagggtcaagggggctctgataccaacttgtcacgaccggaaataacccaacgggcgttccttacgtgcgtgtattattccttgtcccaggaggcaaggtacaccaaaagttgatacaattcagagtttaacaagcggaagcgtaaatagttatttattacatgggcagcgacggcccagcacactcaaagacaacgaaaaacagcagaagactaaggcgacgaccacaggcgcttgacggcaggcacgagctagacaccaaagccttcatcctccaggggctcctctgctgggtttgggaaaaattaaacaagactgagtacaactaccgtactcaacaagacacacccacaagtgcagcataattgcaaaggagtacaatggagttataatataggggttaggttttgcaataaacagcatttaaaagacccatagttgctcaaagctaaatttaaaacacgatcctagaactatttaatattattaatcaaggccgtgaacccacacgaacctgccttaacccaaggcctacgatgattcagaccgaactggcaacccgaccctgggtcccagctcgtcccaagccaacccaggccaaccattccacattttagttgttaagcaggtttgaagaattaaaacactaacttgggtacattgctcggcttgcccataaccgagggcgcggctattcgaatagattatactctgatcagaggtgtacatctttacccacaagacacatcttcctcacgtgtaaccacgtgccacataccaccacggtatacaggcggaagacgtgacatagttcccaacccatcctagccatagacaagagtaccgacccaatcccacctacggccggaacccccgggacaggcaggcaggactgagccccctagcagcaggacaccggccctgtgccatgacatctcgactaccgggccgcagctcgtgtagccttcatttgccctggagatgtccatcgaacccccgacttcgtccatctccatccgtgtacttttgtttataaccagactgagccacaaactaagccttacccactagacatgtggaagtacggtagtgctttgcaacagaggcccgaagaccggtccttatatggccgaggtgctactatcaaaaccatgcaccccgagcccagcctaaaaccattttggggattttgaatagagggggcggtatgaatccaattccacaacaatccaacaaatccaatgtgtccaagtgatatgaatattaccacaatctagagttttaaaaccacctaatgttacctaattaatcagcgaagcatctacctaaaatcatactagtgataccacgagtagcgtgtccactagttgggggttttgtttatcctagggtgaacaaggtaataataacaataacaataataataaggtcataacaaaggtaaataggcatggctaaataaaacagtgataacgcgggaatttaaataaagcgatgatgcaataatttaaatcaaaataatttcataaattgggattcaatatgttcaaggatgatgtgtcttgccttgctcgctttcccaaatgccggcttcaacttccacgaagagcggatcctccgaagctgcagcgtctacacgaccaacagaaaagaaaaggcttttactctaacaaactccatataaaaagcattaacaaagcacaaaaatgggttcttgacttcttaaggaaaaattagagacttgaacggtccaattccgagttcaaatggccaagttatagccatttgaagtttatatgctctttaaatgaatatttgcgaatttcttcatttaaattttaatttaaaattggatttattgcatcagccgaagggaggggcgcgcggaccgggtccacgggagtggggcccacgcggcagcctcacggtccacggtggaccgggtgcacgcggctcactccgaccggcgccgcgggccccacgcgtcagccgcacccgagggcgcgggcggctgacggccgggccccacgcggcagccgctcggtgcgcccgaaggcagccacggcggcgcggccggcgggaggcagcgccctcgccccgatggtcgccgccggcgaccaccggcatggcggagcagcggccgagagaggggagggaaagggggaaacgaaacggcggtccacggctcaccctgagtcgacggcgacgacgaaaacggcagccggagcggaggaaggtggcggcgcggctcgggtcgacggggtcgacggcgttccggcggtcggcgagcgaagcggaggggtggacgaggtcggcgaggatgcggcgaagccgaaggaggcggcgccggggcgggagatggtccggggcgacgacggcggcggaccggagctcggcggcgacggcggagagagagtgcgatggcgcgggctcgattccgacggggaggaagggcggcgagtggcggaaacggtggaggggagcacggggatggtttatatagggttgggagtgagggagggcggccggaggagaaggaaaccggcgcggaagatccggccgccattgatggcgccggcgaggtttgcgggagtgaatccaagcgaatccgagggagagagagaaggaaaaacggggggaaagggagagggaatcgcggggaatatttccccccactttaatgcgcgcggggatggcgggaggcggcgggattcgcggcggcggcggcgctagggcacgggcgagcggcgggagtgtcgggaggaaggggatgacgggtgggccccacccgtcagcgagggtggcgggcgggcccgcccgtcagcggcgcgcgcgcggggaggagtccgagtgggccgcggggagaggagagggaggggagggagctgggccgagccggcccaagagggggaggggagggaaagggaactttttagggtttttctttttataaaacctttttaactttgtttatttcttcttaattattatttgtgctctgaaaattccactaaaatttatttacgcattttaggcttttaggaaatatacaaaaatcctccaagccttatttgacttttatctttgcacattttaatttttgaaggctttcacatggattttaattattctaatcataatttagaggatgtattttagagtcgatttgggacgcgacaattattgatcaaataattactgaactgttctttgtatcatttaggaattgagctctgaaaaaatccgagaaaatttcagagagttgacttaatcatggagaatttaataaaaattaaatccatccatgctttagatttaagaaattttatttcccacatttaacttcacttgtaaaattaaagaacacttaatataaattctattattaatttattaaataatttataaatcctgaaacgaaaatcaggatgtgacaaactaccccccttacaaagaatctcgtcccgagattcggaacggctagaaagaaaaagggaataggtaaactgcagtctatcttattccataactccgataatcattctaaagctttaaagaaaactactgctgctttgaaactggtggctgagctgtaacacttgaaaacgcaactcttgaagacgcaactggcactgcattggctcctgtgacaacaatgttgttgacctgaccttgcgactgctcactagtagactgtgataacttaacagtggttgggttcgatcctgtcatgacaggcagcctcagtgaattggtgatttataataagccagatatagacgataataatcatcgctgctccgtagcagcacatttgttcgcagcggtgtcaacgacgaaggcaatacctgttggttcattccaacagcttaagaagcttgaggtggacagcatctcagcggtgtttgttgcccccatttgcagcctcctcgcttccaccctctacaggttgaggttcacttatgatttgtggatgaaaaatttcacaaaagagcaggagcaggcacttcagctcctcacctccctccgaaatctagaattctatgagtgccaccgtctgcagtcccttcccgaagggttgcatctcctttcttctatctgcacattaggcatcgtcggatgtcctgaaatcagatcgttgcccgaggagggcatcccagcttcactgaaaaaactactagcaatgcgttgcagcgtcgacctgaaggatcaactcaagagattagaagaatcaaaccaagatttacaagtattctacatctgatcacccaaggtaagacgtgatgtcccaactcctttgttttttactctttcatctgcagttgttcatatttaaactcttttttacctgttcgttgttactgttgatcatctagcgagccaccactactctcttttgaacaatgaagtgcagatacacattctaaagtcatttgaacaatgataaaaaatcaaatccgatgggaaaaaacaagaaattgctagaacatgttggacaatcgccatcttttcttactgtgcgcaacaagcctaaccttggcattatggaaactttgcagtaactttgcagtaattagatcgtggatgttctgtacgttgctttattgggagtgatgaccaaaccatttgccacacatagcttgtttttttcaagagaattacagttttgattaaggagcaacacccaaatgattgtggagctaacctcgtttgtctctatttcatcatatgttatgttacagttttgattaagcagtattagatttagatgagagcaactgtaattgtttatggttctggtaacacagtttcatggtcattagtaggagaattctttgaccttattaacttgttccctttcagcaaagcattgtggaatggtgttttttttagcctattcagaaccagttttttacataatggaagctttattaatctcagtaaatttcatcaagtgatacaattattctgagagcacattcggcttctgcaccaaagagtacacacagccaacaagaaagaaacaaaagataaactcatcatccaaaatagcagaaacaaaaagaactttaggagcccgctaaccgtagcctagaacgtcacccatgtgctggggtagaaaactactatatggccactaactctaattgttgacaaaccgcaatgatagtaccctgcaaattgaccttctgaaggatagcctatgagcggagccaatgtgtaatcaaaaagataacctgcaaaggagaagatatgttttttcctttcaaaaaccacattatttctgaaaagccaaatagaccaaatagtggtagttgcacctaataagaccaaagatctcaaattgcgtgattgtcttcttatccaatgcccaaacatatgagttgtactattagataaaactaatattcgaagcaaactgaattaaagaccaaaccgcgcgggcaaaataacaatcaaagaacaaatgattaatagtttcatctttgtggcagaaagaactagacttgtttcctctccaattccttttaatcagattatcttttgttaagattactccatggcgtaagttgtcacgcccgaaaattcactagtaatttccgaacttatttgtgcataaaatcctcgtccaggaatcagccgaggtacacaaactaacaatttaatatacagattcatcaaaatatctaaaacgataaatacttactaaagaggcacttagtcctcaccatgaagaaaactgcagcggaaaaaaaaaaatctagcgaagctccggctccactcccacaggcagctcaactggggtataagccaaacgtcttctccttctggatcctttttcttcaactgaggttgattgattattgcaaggtgagcatatgacatactcagcaagccacacagcaaatatgcaagtgcgcaaagataccaaaggttggcataatataggctcatttgcaaaagcagcatttagcaaaacatttaagagaagtaaaacagtggagtaattaatcagaaattttaatcaacactgaacaacacgcccatgctgctcaggcccaaccattctgaaacaaccatacccggctgtacagatctaatctccaatccaggagctaagcaaattattaccagatataacatccataattattgtgagaagtgtgggactaatcacgaaaaacattgctcaacccgcccataaccgtgggcacggctattcgaatagttttactctggccagaggtgtaccactgtacccacaagacacagccccacatcatgtcaccatgtgcctcagtaccaccacggtacctcggaaaggggctgtgacattaccccttgcataacacaatccaccgcagtgcaccattcctggatcataatcacccccttataaacaaggcatggactccccagcgacccccgtgggcttatctccgccacttctcagtctggtgcaccgcaatgaaccatgctatacgaaaggtaaagccgttgcccacgctggcttgtggttggcacgattaatgtttcacaatagtagctcgcgaaccggtccttaattgtcatgagcacgactctcaaaaccatgtgctcacaacccaccattatcaagttttagttggcaagtaattaattaaccaatcacgattgaccatcgtgaactatcattaagccatcattaaataatgagtcataagttatcccaatagtgtgctaatgtttctaagcatggctaagcaatcatatctaatatctagctgaaccaatatataaagctcaacttgtcaagttataataacccaaggtatcaaggaataaagtaatcaatgcaaacaggccataacaaaggaataggttcacaccacccagtgacattcgaaaataaatgcacagttgaaataaatagagaatttaaatataggatcaacatgctcaaaggattgtgtttaggatctgtgtgacttgccttgcaataatcggtcttcaattaatcttcttgaacacttccggcgcactcacgaaccttcgcaacgacggaaacgacaagctaacacgcaaaacgaagaaaaagactaataaaaaccaaataaacagtacatataaagtaaacaaacatgtagatcataattttagatgaattatgagacttgaacggcctcattctaacttcataagaatttattatgaattttacaagattaaatctaattaaagcccatttaaaaagaattaaataaatttaattctatttatggacaattttaatatgtagatctttattttatataatttttgcaacttgaaccacattaaactgagttcaaatgaattagttatgaatttttaaagattaaatcggattaaaacacttatatggattttaattgaattatgacgcaataatgaattatttttgaaaaggaaaaggaggattattgcgtcagcggctagggtttcgcggtggaccgggtgcacggcaacggttcatgggaacgaacggccgagatcaaccctatccaaaacggacggtcgagatcgatctgtccacgaccggctcacggcggacggtcccgatgacgtcagcgacaacgtcagcgatgacgtcagcaccggcggcgactcgggcggctcgggcgcgtatgctcgccggcgaacggcggctctacggcacaaacggagggcaccaagacgtagatcacggcgcggcgaactcaccgatgaccaaaacgtcggcggaagaccaacggacggcggcggcgtcgaggaaaaggcggcggagaagatcgggtcgacggcggcgacggtgctccgatggtcttcggcggcggtgaagcggtggacgaggacggcgacgcgacggcgaccacgatggcgatcttcccgagcgacggcgacgtctggaacggcggcggcgcacggctgaagcgacggcggcgacggcggcgctagggcacacggagctagggcgctacggacgacgagaggcgaaggcgagggtggcggtgggtagaggagacaccggggatccttataaaggggctaagaggcgacggcgaaggcccacggctgccggcgacgagaaggaaagatcggggtttgaaggaaagagaccgatccgattcgaactcgaatcaaacacattccaaaccgatttagccgatgtttccaaaggggaaaaggtggaggagatcccggagatcgtttcccctcaatcaatttcaccggaaacggaaaggaacggccggatttggaaggagacggcggcgcttgcgctagggtttcgggcggcggcggcggcgcgaggaggaagacaggcctgacagacgggccccacctgtcagcggctgagagagaagagcggcggctcggcggactgggccggactgggccgaggagggagagagaaagagagagggagggttttgggccggctttcggcccaaagccaaaaaaaaaacctttttcaatttaaattattcatgaaatgcaattccatttattaaaaacacttccttagctcaaataaatcccagaaaaatctagtaattatagaattaagcaaagtatttaacaaaattttatctagcccaattttatattgagatttaacaaattaaaattagatcttctcttttaggcttttaaaatcatttctaataattccttttaaacaacaatttataatttaaggattttaaacaagaaaagcacttaacaattataattagatcattattgtcacgaccggaaataacccaacgggcgttccttacgtgcgtgtattattccttgtcctaggaggcaaggtacaccaaaagttgatacaattcagagtgtaacaagcggaagcgtaaatagttatttattacatgggcagcgatggcccagcacactcaaagacaacgaaaaacagcggaagactaaggcgacgaccacaggcgcttgacggcaggcacgagctagacaccaaagccttcatcctccaggggctcctcttctgggtttgggaaaaattgaacaagactgagtacaaccaccgtactcaacaagacacacccacaagtgcagcataattgcaaaggagtacaatggagttataatataggggttaggttttgcaataaacagcatttaaaagacccttagttgctcaaagctaaatttaaaacacgatcctagaactatttaatattattaatcaaggccgtgaacccacacgaacctgccttaacccaaggcctacgatgattcagaccgaactggcaacccgaccctggttcccagctcgtcccaggccaacccaggccaaccattccacattttagttgttaagcaggttttaagaattaaaacactaacttgggtacattgctcggcttgcccataaccgagggcgcggctattcgaatagattatactctgatcagaggtgtacatctttacccagaagacacatcttcctcacgtgtaaccacgtgccacataccaccacggtatacaggcggaagacgtgacatagttcccaacccatcctagccatagacaggagtaccgacccaatcccacctacggccggaacccccgggacaggcaggcaggactgagtcccctagcagcaggacaccggccctgtgtcatgacatctcgactaccgggccgcagctcgtgtagccttcatttgccctggagatgtccatcgaacccccgacttcgtccatctccatccgtgtacttttgtttataaccagactgagcaacaaactaagccttacccactagacatgtggaagtacggtagtgctttgcaacagaggcccgaagaccggtccttatatggccgaggtgctactatcaaaaccatgcaccccgagcccagcctaaaaccattttggggattttgaatagagggggcggtatgaatccaattccacaacaatccaacaaatccaatgtgtccaagtgatatgaatattacaacaatctagagttttaaaaccacctaatgttacctaattaatcagcgaagcatctacctaaaatcatactagtgataccacgagtagagtgtccactagttgggggttttgtttatcctagggtgaacaaggtaataataacaataacaataataataaggtcataacaaaggtaaataggcatggctaaataaaacagtgataacgcgggaatttaaataaagcgatgatgcaataatttaaatcaaaataatttcataaattgggattcaatatgttcaaggatgatgtgtcttgccttgctcgctttcccaaatgccggcttcaacttccacgaagagcggatcctccgaagctgcagcgtctacacgaccaacggaaaagaaaaggcttttactctaacaaactccatataaaaagcattaacaaagcacaaaaatgggttcttgacttcttaaggaaaaattagagacttgaacggtccaattccgagttcaaatggccaagttatagccatttgaagtttatatgctctttaaatgaatatttgcgaatttctttatttaaattttaatttaaaattggatttattgcgtcagccgaggggaggggcacgcggaccgggtccacgggagtggggcccacgcggcagcctcacggtccacggtggaccgggtgcacgcggctcactccgaccggcgccgcgggccccacgcgtcagccgcacccgagggcgcgggcggctgacggccgggccccacgcggcagccactcggtgcgcccgaaggcagccacggcggcgcggccggcgggaggcagcgccctcgccccgatggtcgccgacggcgaccaccggcacggcggagcagcggccgagagaggggagggaaagggggaaacgaaacggcggtccacggctcaccccgagtcgacggcgacgacgaaaacggcggccggagcggaggaaggcggcggcgcggctcgggtcgacggggtcgacggcgttccggcggtcggcgagcgaagcggaggggtggacgaggtcggcgaggatgcggcgaagccgaaggaggcggcgccggggcgggagatggtccggggcgacgacggcggcggaccggagcttggcggcgacggcggagagagagtccgacggcgcgggctcgattccgacggggaggaagggcggcgagtggcggaaacggtggaggggagcacggggatggtttatatagggttgggagtgagggagggcggccggaggagaaggaaaccggcgcggaagatccggccgccattgatggcgccggcgaggtttgcgggagtgaatccaagcgaatccgagggagagagagagggaaaaacggggggaaagggagagagaatcgcggggaatatttccccccactttaatgcgcgcggggacggtgggaggcggcgggattcgcggcggcggcggcgctagggcacgggcgagcggcgggagtgtcgggaggaaggggatgacgggtgggccccacccgtcagcgagggtggtgggcgggcccgcccgtcagcggcgcgcgcgcggggaggagtccgagtgggccgcggggagaggagagggaggggagggagctgggccgagccggcccaagagggggaggggagggaaagggaactttttagggtttttctttttataaaacctttttaactttgtttatttcttcttaattattatttgtgctctgaaaattccactaaaatttatttacgcattttaggcttttaggaaatatacaaaaatcctccaagccttatttgacttttatctttgcacattttaatttttgaaggctttcacatggattttaattattctaatcataatttagaggatgtattttagagtcgatttgggacgcgacaaaccttccccccttaaacggaatctcgaccccgagattcggaagaactggcgaagagatcgggatgggctgccttcagctcgtcttcacgctcccaagtagcttcttcctcggcatggttgctccattggaccttgcaaaaacggattacccgattcctggtcctgcgctccatggtgtctaggattttcactggtctctccacgtaggtcaagtcttcgcgaacttcaatctgctctgagtcagcctgctcggacggcactcgaagacatttcttgagttgcgacacatggaacacatcatgcacgttgcccaaggaagcaggcaactccaattggtacgctacttctccgcgtcgagcagtgatgcggaaaggacccacgaaccgaggtgcgagcttccctttcgtctgaaacctgtgtacccctcgcaatggcgttacccggagatacacaaagtcatccactgcgaattccaggtcacggcgtcggttgtctgcataactcttctgccgagactgtgccacctttaggttttcccaaatggttctgaccttagcttcggcttctctcaggatatcggtcccgaacacttggctttccccaacttggtcccacaatagcggtgtccgacatttgcgtccatacaacgcttcatagggtgccatttgtatgctggcttggtagctgttattgtaggagaactcggcataggggagactattatcccatgttttcccgaaatctaggacacatgcgcgaagcatatcctcgaggatctggtttagacgctcggtttgaccatctgtctgcgggtgatacgcggtgctgaaatttaatcgggtacccaactcttcttggagcttcttccaaaagtgagagatgaactgacttccccgatcagatacgattttcttggggacgccatgcagacttacgatcctagcgaaatagagttcagctagtttgttccctccataggtggtcttcacaggaataaaccgagctactttggttagtcggtccacaactacccatatagaatcatatccaccttgggtttttggaagtccagtgataaaatccatcccaatttcatcccatttccattctggtacttggagaggttggagaagtccggccggtcgttggtgctctgccttgacacgctggcacacatcacaaagggctacgaactccgcaatctcccgcttcatactaacccaccagtatttctctttcaagtccaggtacatcttcgtactgccagggtggatggaataaggactttcgtgagcttcctgaagtatcaactgtttaagttccctgacgtctggaacgcatacccggtttccattccatagagttccgtgttcatcctctgtgaaaccagcggctttaccctgtttcatattcttgaggatcccatgcatatctagatcattcttctgagcctcgcggatttgatcgagtaaggtaggcttggcttccagtgtagctaagaatccatggctaacgatgcttaggttcagggcttccaactgttgattaagctccagtggaatgccacggacgccaagagtgttgcaacggctttttcgactcagcgcgtctgcgaccacgttggccttaccagggtgatagtggattcccacatcataatccttgatgagttctaaccatctcctctgccgaagattcagatccgactgggtgaagatgtatttcaaactcttatgatcggtatatatttcgcagcgattcccaatgagatagtgccgccagatttttagagcatgaaccaccgcggctaactccaaatcatgggtagggtagttgccttcatgaggccgtagctggcgtgaggcataggccaccacatgaccttcctgcatgagcacgcaccccaatccttggcgcgaagcgtcacaatacaccaggaagtctttgcgagtatccggcaagattaacactggcgaggaaaccagcttttctttgagtgttttgaacgccttctcgcattgcgggctccacacaaatttctcttctttcttcaacaactgtgtcatgggtcgagcgattttggagaagttctcgatgaacctccggtagtatcctgccaaacctaagaaactgcgaatttgagtgactgtcttgggttgcttccaatcggtgacggcggtcactgtttcggggtccacagcaactcctttagcagatatcacgtgccctaagaatttgacttcggacaaccagaactcacacttgctaagcttggcatacaattgatgttcccgcaactttcccaacaccagacggagatgttgctgatggtcttcctctgattgcgagtacaccagaatgtcgtcgatgaagaccacaacaaacttatccaagtattccatgaacactttgttcatcaagttcatgaagaaagcaggagcattagtcagaccgaacgacatcaccgtgaattcatacagtccatatcgcgtggtgaatgcagtcttcgggatatcttcttcacggatgcgcaactggtgatatccggaacgaagatcaatcttggagaataccgtggcacctttaagctgatcgaacagatcatcgattcggggaagagggtacttatttttgatagtaacttcattgagagctctgtagtcgacacacatcctctttgtcttgtctttcttctccacaaaaattacgggagcaccccagggggaagtgctcggacgtatataccccttttctttcaactcttccaactgtttcttaatttcggccagttcatttgctgccatacggtagggccgtttgtacaaaggagttgttcctggagcaagatctatccggaactcaatctctcgcttgggcggcataccgggtagttcttccggaaacacgtctccgaactctctgacgatggggatttctaacagtcctatctgatgaagttctgaactactgacagaggttgggggtgcaaataaaacaaccggttgttccggccctcggtgcagagtgacagtgcgtcttgcacaatccactactccttggaattgagccaaccaattcatcccaaggatcacatccaagttcttggtgtctagaagaatcagatccgagggaaacggaattccctgaatttctatgggaacggcagggctatagtacttcgctgtcataacccctccaggggtggtgatgagcatagggttcctaagcctttctacccccaactgatttctccccacgaatggcacagatataaacgagtgggaagctccagagtcgaacaaaatggtagcaggggtggaatggatgaggaacgtaccaacgatgacgtctggagttgtcagcacatcctcggcagtcacgtggttcacacgaccccgaatgacgtccttaccaccgttgttggagcggggcggcgcttggccttgctggcgcctcggctttgggcatttatccgcaaagtgcccaggctcgaagcagttgaagcacagactctgctgaccttgaacgtctctgtggccttgaccaggctgcacagctggcgcagggggacggggtgcacgggtcccttgctgaccctgcggttgctgcggctgtgggacgcgcaccacaaattgaggtcggggcgcggagggaggttgctgctgttgctgctgcgaggaggatccccctggatagggattggtgtagcggaccctttggttagccccctgttggttgcggaaattcgccaagcgacgcttgtgcgactccaattctttgtgcttggcttccaagcggatgctcttgtccaccagacgttggaaatccggataatccccggagatcagacgtacggacagctcagggtccattcccgccaagaacttctcttgcttttcctcatcttcccgaacgtcctccggggcgtaccgggccaggttgttaaactcatgcaaatactccatcacagagcggttgccttgcttcaactcccggaatgcccttttcttaagggccatgactccggcaggcacatgggttctccggaaagcggcggtgaaacgggcccaggtgataggctgcccctcgggctgcgtagcctagaagtggtcccaccatagagatgcgggcccctgcagctggtgggtggcaaagatgactttctcctcatcgttgcactgcacagtgtctaacttcttccccactgcatgcaaccaatccaaggcatccacggggttattggagctggagaaggtaggcgggcgaatgcgaaggaactcggcgagcttagagtgttgcgggggtggtggtggaggtggagcattatgctgtggtggattttggatgtggtggaggaaagcagccatcatgttggcttgctgggcgaggatttgggtgaggatggcgttggtgtctggtggtggtggtggaggcggaggaggaggtggaggtgggctgccatggttgttgaggttgctgccttcgggttggtggccatcaccggtattagcacttctcctggtcgtcaccatctgaaaaccccacacggaaccagcaaacagagagagctgacaattaaaactaaccacccacgactaccataattcttgagtttaatactgctattaaattggttcattaaggttcaaattgcttaggcaaataaaataaagacaggctccgacatagttataccacacaccggcataaccatgccccatacgactctagcaaaacaaacaaacgaaaagaacacacgcgcaagcctactaactgctcgtctaccgctgcgacgggccaggacggaaggtgagcagcagcgcatcctccgtgctccctacgccggaggcttccccctcctgaggaaccacgggcgcgggctcggcacgaggggtctccacgaagcaggtccacgccagggactgacaaacaagctcgggcctggaggtactcttgcgagcggtgatcttctggctgcggcagacgcggcggcgcttgggacgacagacctctccctgggcgaccttgagctgacagagctgcgcctccagcacgtccagatccttcttcagctgcagattctcctgacgcagctccaggatcttcatgttgttatcgaccatcccgcggcgcaccatctggtggaagtcgatacgggccgcgtcgtacgcctccaccatgcgcgccaggtgcatgatggtagcgtcatcctccgagctagcatcccggaaggtggcgtagtcgcgggctcctccgcggcgagggtggtagcggtagggcgagtgctgcaactcgtccgggtagcgctggtgcagagtgccgatggcgaggagagcggcgttctggcaagcggcggagaaggaatctccacccgcggtgactgccagcgaagtcctctcaggtgagccagagaggatcactgcagtgacctcccaagcagcgacgggctctgcatcgtcaccctcctgctctgggaccggcttgccctggtagtccactccatgtgtgtcacgtcctgataaattcatcccgaaataaaaatcattctctaaaaggaataatagaattaattaaaatttgaaaagaaattggcaaacattaaaatacgtacaagaaaaattcaaatgtgacccggagaatttttgttaaattctccttggtctaaaaggagccctcaaattttagtggaattctcagagcacaaataataattattaagaaataaacaaagttaaaatgattttataaaaagaaaaaccctaaaaagtctttcccccccttttcccctcttgggccggctcggcccatccctttctctctctctcctcttccccgcggcccatccggcctcctccccgcgcgcgcgccgctgacgggtgggcccgcccgccaccctcgctgacgggtggggcccacctgtcatccctgtcctcccgccgctcccgccgcctcgcccgtgccctagcgccgccgccgccgcgaatcccgccgcctcccgccgtccacgcgcgcaataaagtggggggaaatattccccgtgattccctctctctttccccccatttctccctctctctcccgcgttcaaacaggctgatttgcccccgcaaatctcgccggcgccattgatggcggccgacctcccgcgccggtttcctcccttccccggccaccctctctcgcccccggctctatataaacactccccgtgcctctctccaccgtttccgccactcgccgctctctttccccgtcggaatcgagctcgcgtcgtcgtcctctctctccgccgtcgccgccgagctccggttcgccgccgtcgttgccccggaccatctcccgcttcggcaccgcctccttcagcttcgccgcatcctcgccgacctcgtccacctctccgtttcggtcgccgaccgccggaacgccgccgtccccgtcgacccgagccgtgccgccgcctctctccgctccggtcgccgttcccgtcgtcgccatcgatccggggtgagccatggaccgcccatttcgtttcccccttccctcccctctctcggccgccgctccgccgtgcctatggccgccgctggcgaccataggggcgcgggcgcgccgcctcccgtcggccgtgccggcgaggccgccttcgggcgcgccccgcggctaccaggtggggcccggccgtcagccgcccgcgcccccgggtgcggctgacgcgtgggacccacggcgccggccggcgcaagccgcgtgcacccggtccaccgtggaccgtgaggctgccgcgtgggccccactcccgtggacccggtccgcgcgcccctcccctcggctgacgcaataaatccgattttaaattaaaatttaaatgaagaaattcgtaaatatccatttaaagagcatataaacttcaaatggccataacttggccattcgaactcggaattggaccgttcaagtctctaatttttccttaagaagtcaagaaaccatttttgtgctttgtttctgcttgttatatggagtttagtagagtaaaagccgtttcttttccgttggtcgtgtagacgctgcagctcggaagatccgctcttcgtggaagttgaagccggcgtttgggaaagcgagcaaggcaagtcacatcatccttgaacatattgaatcccagtttataaaattattttgatttaaattattgcattgtcgctttatttaaattcccgcgttatcactgttttatttagccatgcctatttacctttgttatgaccttattattattgttattgttattattaccttgttcaccctagattaaacaaaaccccaactagtggacactctactcatagtaccactagtataattttaggtagatgcttcgctgattaattaggtaacattaggcggttttacaactctagactttgggatattcatatcacctggacactttggaattgttggtttattgtggaattggattcacaccgccccctctattcaaaatccccaaaatggttttaggctgggctcggggtgcatggttttgatagtagcacctcggccatataaggaccggtcttcgggcctctgttgcaaagcactaccgtacttccacatgtctagtgggtaaggcttagtttgtggctcagtctggttataaacaaaagtacacggatggagatggacgaagtcgggggtcgatggacatctctaggacaaatgaaggctacacgagctgcggcccggtagtcgagatgtcatggcacagggctggtgtcctgctgctaggggctcaatcctgcctacctgtcccggaggttccggccgtaggtgggattgggtcggtactcttgtctatggctaggatgggttgggaactatgtcacgtcttccgtccgtataccgtggtggtatgtggcacgtggttacacgtgaggaagatgtgtcttgtgggtaaagatgtacacctctgatcagagtataatctattcgaatagccacgccctcggttatgggcaagccaagcaatgtacccaagttagtgttttaattcttaaaatttgctcaacaactaaaatgtggaatggttggcctgggttggcttgggacgagctgggactcagggtcgggttgccagttcggtctgaatcatcgtaggccttgggttaaggcaggttcgtgagggttcacggccttgattaataatattgtgtagctctaggatcgtcttataaaatggctttgggcaactaagtgacttttaaatgctgttttctgcaaagcttaacccctatattattaccccttgtaccccctttgcattaatcatgcatctgccggtgtggctcgctgagtactgtggatgtactcattcttgctcaatcttttccctcttcagtaagagaagctttggagaagaagtcttaggtggagtcctggcttataccccagttgagcgcctgtgaagatggagccgtaggcccgctagtccgctgctgtttatttttgattgtcaggccttaagtgcctttgtaataatgtaaatattatcgatataataaagatgtgccttttgtatcatgtttgttcggtgtaccccggcttttcctgggacggggattaatacactagcgttcgggaaaaggtaattttctcggtcgcgacaagctggtatcagagccatctcgactgtaggataagccaagtggataaaacctaaggacatattttctaaataaaactatttgcgaaagttccttttttctccttcccctaatgctatttgcaaaaggtttactcccttcttccttcttcggatttcaactagtactagatggtcaggtcagtgaagaagaagacatcgtcagttgtttgccgaagctccgaaagactgcaggatccgctagcgaagtggaggaagcagtgaagccagctgtgaagcaggagtgaagatcttgagaacccgtcacagaacctaagccaccctctagggtagagttgttagtcgtgtgtttccttgcttgtgtgtgtagcgcgtggtttgcatcagtgggttgtgatgtaaccatgctaggttgtttgcttaatcaacttgcagaataagcctaacatacatcataacagcaaaagacttagatctgttaaggtcctattcttagtttctaatctgtctctcccctttgttttccctctctccctctccaaacctttgcaacagatggctgacaatgagaaaggcaataaggtcagaagtcaggacatcggtacctcaagctcccgagtgaatgaagcaccagacaccatttgtgtgacactggtccaacacctgattaaccagaaccgattgcttatagagatactacagcagcatcagacgccaattctgaacctgagtcagatacaacctcaagtgcagttggaggcagtccaagcactcacaccacgagtcagcatgccgccagcatcccgaaggacccatggtgacgtgccacatgttgactcaaaagaagcaagtatcatttgttttatgtgtgatgagcaagggcactatgcaagggagttgtcgcgaccgagaaaattgccttttcccgaacgctagtgtaataatccccgtcccaggaaaagccggggtacaccacacaaacatgatataaaagacacatctttattatatcgataatatttacattattacaaaggcgcttcaggcctgacaatcaaaaataaacagcagcggactagcgggcctacggctccatcttcacaggcgctcaactggggtataagccaggactccacctaagacatcttctccaaagcttctcttactgaagaggggaaagattgagcaagaatgagtacaaccacagtactcagcaagccacaccggcagatgcatgattaatgcaagggagtacaaggggataataatataggggttaagttttgcagtaaacagcatttaaaagtcacttagttgcccaaagccattttataaagacgatcctagagctacacagtattattaaacaaggccgtgaaccctcacgaacctgccttaacccaaggcctacgatgattcagaccgaactggcaacccgaccctgggtcccagctcgtcccaagccaacccaggccaaccattccacattttagttgttgagcaaattttaagaattaaaacactgacttgggtacattgctcggcttgcccataaccgagggcgcggctattcgaatagattatactctgatcagaggtgtacatctttacccacaagacacatcttcctcacgtgcaaccacgtgccacataccaccacggtatacagacggaagacgtgacatagtttccaacccatcctagccatagacaagagtaccgaccaaatcccgcctacggccggaacctccgggacaggcaggcaggactgagcccctagcagcagggcaccaaccctctgccatgacatctcgactaccgggccgcagctcgtgtagccttcatttgccctggagaatgtccatcgacccccgacttcatccatctccaatccgtgtacttttgtttataaccagactgagccacaaactaagccttacccactagacatgtggaagtacggtagtgctttgcaatagaggcccgagcttaatccttatagtggccggggtgctacttcccacaactggcatgcacccaaaccccaccgaaaacatgttttaggggttttgaaagagcaagagaggtgtatgtccaattccaccataaaccaacaattccatagtgtccaaatgatatgaatattcccaaagtctaaaattataaaaccacctaatgttgtcctattaatcagcgaagcatctacctaaattcatactagtggaaccatgaatagagtacccactagttggggttttgtttatcctagggtgaacaaggtaataataacagtagcaataataatgtcttaacaaaggtaaataggcatggctaaataaaacagtgataacgcgggaatttaaataaagcgatcatgcattaatttaaatcaaaataattttataaactgggattcaatatgctcaaggatgatgtgacttgcgttgctcagagagaacggccttccgaaccttcggcgacaaccacgaaccacgcttcgggaacctccggaacgacgaaagctacgcgaagcacacaagcaaagctacaagcctataaagaagcaataacaatacataaaaagaaagcacagggttctttaggttatatcaaacattaagagacttgaacgggtcgattcggagctcgcatgaccaagatatgatcatccgaagtttaatgctgttatatggagatttgcggattattataattaagctttgcaactataaaacaggtgtaagcgctagcctggaaaagacaggaaggctgcgccgttgacatgcggaccccacatgtcaacctaaaggaccgcggtagaccgggtacacagagacggtcctcgggtcgacggaagcagaccccgtgtgtcaaccgaggcgagtggccgacaaacggactccactaaacaccacacggcctgcacacgtggaaatcacgcggctaccgagcgggcacactaacacggacactacacggtcaccacccgcacgcgtgaacgactaccgacaccggtacacgggtaccggggccgacaaccgcacaacgagcacgggcaacaccgaaaggacgaggacggggaagcgagaggacggatccttaccaccacgcgacgaggcgcgggaacgacaacgacgaacgggcgcggcggagacagacgggcacaacggagacgaacggcgaggggacggcttcggcggcgatccttggacgaaggcgagacgcggccggcacaaggcttgacgacgcggagccgaggacgaagacgaggacggggctgcagcggctcgcttgacgaacgcggacgacggacgagaacggctcgacggagggacgaacgccacgacgatcgggaacgacgagaggacgaggacgacgacgaccggggccggcgagggggcgacgagggacagccagcagtggctgcacggagacggggacgacgtggaacacgcctgtcgcgaccgggaaaattgccttttcccgaacgctagtgtattaatccccgtcccaggaaaagccggggtacaccacacaaacatgatataaaagacacatctttattatatcgacaatatttacattattacaaaggcacttaaggcctgacaatcaaaaataaacagcagcggactagcgggcctacggctccatcttcacaagcgctcaactggggtataagccaggactccacctaagacatcttccccaaagcttctcttactgaagaggggaaggattgagcaagaatgagtacaaccacagtactcagcaagccacaccggcagatgcatgattaatgcaagggaggtacaagggaataataatatagggattaagttttgcagtaaacagcatttaaaagtcacttagttgcccaaagccattttgtaaagacgatcctagagctacacagtattattaaacaaggccgtgaaccctcacgaacctgccttaacccaaggcctacgatgattcggaccgaactggcaacccgacctgggtcccagctcgtcccaagccaacccaggccaaccattccatattttagttgttgagcaaattttaagaattaaaacactgacttgggtacattgctcggcttgcccatatccgagggctcggctattcgaatagatttactctgatcagaggtgtacatctttacccacaagacacatctttactccgcattccatggccttggaacccgtcgtaaagatgtgacataacccttcacccatcctagccgtgaacaaaagtaccgacccaaccctgcctacggccggtatcccgggacaggcaggccagggttgagcccctagcaacaagatctagaccgggtgcgccacacacataggggtgagaccacccgcgtactagtccagtgccatggcatctcgactaacgggcaccgacccgtgtagtcttcatttgcctagacatctcgattaccgagccgcagctcgcgtagccttcatttgcctcagagatatccatcgtcgcaacgacttcatccatctctatccgtgtccttttgttcaggactagcctgagcaccgagttaagccttacccattagacatgtggttagtacggtagtgctttgcaacagaggcccgagcttaatccttatagtggccggggtgctacttcccacaactggcatgcacccaaaccccaccgaaaataggttttagcggttttgaaagaggaagagaggtgtatgtccaattccaccataatccaacaattccatagtgtccaaatgatatgagaattcccaaagtctaaagttataaaaccacctaatgttgcctaattaatcagcgaggcatctacctaaattcatactagtggaaccaggaatagagtacccactagttggggtttttattttcctagggtgaacaaggtaataataacaataacaataataatgtattaacaaaggtaaataggcatggctaaataaaacagtgataacgcgggaatttaaataaagcaataatgcagtaatttaaatcaaaataatttgataaactgggattcaatatgttcaaggatgatgtgacttgccttgctcgctttcccaaacgccggcttcaacttccacgaagagcggatcttccgaagctgcagcgtctacacgaccaacggaaaagaaaaggcttttactctaataaactccatacaacaagaaggaacaaagcacaaaaatgggttcttgacttcttaaggaaaaattagagacttgaacggtccaattccgagttcaaatggccaagatatggccatttgaagtttatatgctctttaaatggatatttgcgaatttcttcatttaaattttaattaaaaaaaatcgggtttattgcgtcagccgagagagagggcgcgcggaccgggtccacgggagtggggcccacgcgtcagcctctcggtccacggtggaccgggagcacgcggctggcggcggtcggcgccgtgggtcccacgcgtcaaccgcacccgcgggcgcgggcggctgacggccgggcccacttggcagccgcgagggcgcgcccgaaggcggcctcgccggcacggccgacgggaggcggcacgaccgcgccccgatggtcaccgctggcgaccaccggcgcggcggagcggcgcccgagagagcggagaggagagggaagcgaaagggcggtcttcggctcaccccgggtcgacggcgacgacgggaacggcggccgaagcggaggaaggcggcggcgcggttcgggacggcgagggcgacggtgctccggcggtcggcgagcgaagcggaggggtggccgaggtcgacggggacgcggcgaagccgatggaggtgacgccgagtggggaggaggtccggagcgacgacggcggcgaaccggagctcggcggcgacggcggagagaaggtgcgacggtgcgggctcgattccgacggggaggagagacggcgagtggcggaaacggagggggagagcacggggaacgcttatatagcgtcgggagggggagagcgcggccggagagggaggaaacgggcgcggagatctcggccgccattgatggcgccggcgaggtttgcgggagcgattccggacgaatccgagggagagagagagggaaaaacggggggaaagagagagggaatcgcggggaatgattcccccctcattatggcgcgcggggacggcgggatgcggcggaatccgcggcggcggcggcgctagggcacgggcgagcggcgggagcggcgggaggaaggcgatgacaggtgggccccacccgtcagcgagggcggcgggcgggcccgcctgtcagcggcgcgcgcgcgggggaggaggccgatgggccgcgggggagaggaaagagagggagggagagttgggccgagccggcccaagagaggaagggggggaaaagaagacttttagggatttttctttttataaaaccttttcaactttgtttatttcttaataattattattcgtgctctgaaaattccactaaaatttgagggctccttttagaccaaggagaatttaacaaaaattctccgggccacatttgaatttttcttgtacgtattttagggtttgccaatttcttttcgaatttttaattaattctattattccttttagaaaatgatttttatttcgggatgaatttatcaggacgtgacaacgccgctgcgatgacgttgacggaggcggcaccgcgagacgacgagccgggcgaccgacgggacgtcgacgacgagaacgaacggagacaacgacgatggaccgcggaggggttcggtcgaaggggaggcgaggccgagggcgaccttgccgctgcgatgccggaggtggtggtgccgcggctgaccggtaaacaagcgaggaggaacgggcggccggaggactccggcgaggcgggtggaggggttggtggcgacacggcggtgttccggcgaaaccgaggagcagctggaggtgaggacaacgctgcgacgtcgacggaggagatggcgacgtcgatcggcgtaccggcgacgtacaggagccgaccggagaccgggaggtactggacgccgacgacgaggccactccggcgagcttcgggcgaggaggaggtgatgccggggaaggaggcgatgccgcggtgtcgaaggaggagacggcggcgtcgatcggcgcaccggcgacgtacaggagccggctggagggagtacagtggcaccaatgccactggttgccggcgggggcaccgttccggcgatttccccacaaatcggaggtggcgccggggaagaggaggcggctgcgacgctggaggaggcgacggcacggccggccggtgcgcgggcgaggcggcacaggcggctggaggcggccggcggcgtgggagagagaggagggcggcggggagatggctagggaccacggggaggctcgggagggggctaaaacgagagaacgggggatgaggatcccattttatatgagaaaagagggagccggccacgggggagggcggaacggcgacgggaatggcggccggcggccatggttggtggccgggaaaagcgcggccgttcccgacgattgggggcgccattcaagagggaaattggggggaattgaagaggattcaatggggtttaatttcccctaatcaatttggaaagaagggcattgattcgcgtggatttaagggaggaacggcgcttggtttccggggagagagagagagagaaggccggctgggggaggaagacgatgacgacctggcgcgtgggccccacgcggtcaggcggcgtcgtcagcgcgcgcacgcgcgcggcacgggcgggagggcggctcggcctggaggggggggtgcggcttgggccgggcaggccgggagggggggggagagacagcccgggagagagagggaggagggtgctgggccgaggggaagggggcccaagaggagggagagaaggagagggagagaaagagagggaggaatgggagacttcggccgcgggccgaggggagagagggaggactttgggccagacttggcccaaaggaggaaggagggttatttttaggtttttctttttaataaactttgttaattgtttttgttgcttaataattatttccggtgctataaaaattcaagtaaaatttgagggctccttttagaccaaggagaatttaacaaaaattctccgggccacatttgaatttttcttgcacgtattttagtgtttgccaatttcttttcgaattttaattaattctattattccttttagcgaatgatttttaattcgggatgaatttatcaggacgtgacaggagggtcctcagcagaaaagaaaaacaccaatgcgaaccgaagatgaagtccgtaagatgatcattaccagcacagaatggcctccaccaggaatgacaaaacgtcagagaagaaataccttccgaggtgcaccacagttgacagagcatcttttagctaatggaggtagagtgtctgatagtgaagattcagatcaagtctcctcagatgatgaagatgagaagtctccccaaggtttcaaccagaataaaatggaacgtaaggcatgctctcgttgtggagaaatcggtcatgttgccagctcgtgtgccactacatgcgttcattgtgaggaagaccatccacccgacaggtgtccaacgagcaggatcacttgtttcttttgtgaaggaactgatcatgtaccaaaagattgtcaattcagtttgctgctgacgaagaagatggccaaccaacccgccagttccaacggagagaagcatcaagatggatgaagtcgggggtcgatggacattctccagggcaaatgaaggctacacgagctgcggcccggtagtcgagatgtcatggcagagggttggtgccctgctgctagggtgctcagtcctgcctgcctgtcccgggtgtcccggccgtagggggattgggtcggtactcttgtctatggctaggatgggttggaaactatgtcacgtctttcgtctgtataccgtggtggtatgtggcacgtggttacacgtgaggaagatgtgtcttgtgggtaaagatgtacacctctgatcagagtaaaacctattcgaatagccgcgccctcggttatgggcaagccgagcaatgtacccaagttagtgttttaattcttaaaacttgcttaacaactaaaatatggaatggttggcctgggttggcttgggacgagctgggacccagggtcgggttgccagttcggtctgaatcatcgtaggccttgggttaaggcaggttcgtgtgggttcacggccttgattaataacattgtatagctctaggatcgtgtttacaaaatagcttgagcaactaaatgtctttaaatgctgtttacttcaaccctaacccctctatgttataattcccttgtactcccttgcatttattctgcacttgtgggtgtgtcttgttgagtacggtggttgtactcagtcttgctcaatttttcccaagcccagaagaggagctccttgaagatgaaggctttggtgtctagctcgtgcctgccgtcaagtgcctgtggtcgtcgccctagtcttccgctgtttctcgtttgtctttgtgtgtgctgggccttcgctgcccatgtaataaattaactatttacgcttccgcttgttaaactctgatttgtatcaacttttgctgtaccttgcctcctgggacaaggattaatgcacgcacgtaaggaatgcccgttgggttatttccggtcgtgacacaccatcacctgggacgagttttcatctgtattcaagagatcccatgttcccgcaggaatgatcacactgagaaaacgagagttccgctacctgaagcaagaagatttgaccgtcacagagtacctgcacgagttccatcgtttggctcactatgcaccagaagatgtggaaaatgatgaagacaaacaagagaagtatctccaggggttaaaagatgagatcacagtgcaactactcctagaggaatatgaagattttgagaaacttgtggacaaagccatacaactcgaaagtgagcataatcggatgaagaactgtaagagaaggattgtcagcatcccagtattcccatgtggtaaccaaagacagcgcacggagccacttcagatcaccggatcttctgttgcgcatcaagagtttccgccccaagaagatggacacaatgcagacaacaacattagcaatactaatgatgatgataccaccaacaaccatgcttcttgccgcattagtgaccactcaaatcaagcgtgcaatgtcaacatcattcaccaaggtgtcgacgatagtatcaatgatggcacccaaaatgacaaccctagcaattgtgactctgagaaagactccaatggtgatagcaactatggtaccattgatgccaatgttagcaaggatttccaaccaccaattccaactccaagtcagaatgatcgtccccagacagatagctcagcaaagaagacgttgatttgctacaattgcaaaggaccagggcattactcgagggactgcctgcaaccaaggcaaagtcgatctccacattaccgccaatttacacgaagcagacatcccaatcgtattgtggtcactggagcaaacgccgtacccgtgaggcctcgtgttaatcagaacccatagcagaaacaatgtgccgatgctaagcacctttccttttaggcagtgcttagtattcatgtaatgagggagaaatgtgtaatacagacaagttctatgagggttcttttggaagatgtggatatgtgattatgtgtataattgcttactgataaaggagacctagggtctcatttcagaggaactatgttctaacctcgagttaataaccaacctgttgatggaaaagaaaaccaattaaactgtgttgggttaaaaagccaatgagacagtagttggggataggagtttggatacgccttttacagatcaagataaggattgttggatgaaacccataagggtacccgccatgcctctacattgataagttcggatatacctgcaagcagttaagaagatccaggagacatcaatatttgagaacatagtagtcgatggttggtaattaatctatcaggtatcagaaaagggtcaaaggtgatatggcagaagaacaatttggatgctccccatctcgaggaagcactaaagatgatcatcggcaattaaaccctagtggcatagatacagatagcaagcaatgtatttccctgaaggtagtcagtgcagctttttgacgaaccacatcaaggtttcactgaaaggcagcaagccaaaggatctcatcgtccccagaagcgtctgcaatccacattaaagaataccacctgttagaggtaagccgaaagatgattgataaaagagattggcaaagatgttctctagcatgaaagaagtaggccgaaaggtgattgataaacagaaacatgctctgcatcgctcaaggaagacccctgattgtaattgccacgcaacagtcaccttgtcattaagtaagcaagatgacctaggtaaaagtgtttctaggaaggcaaagagtgaaatcttcaactcggtatcagatgctacacggagtgaaaagtgcaagcaccggttaccagacaatgccatttcttgggagatgatccaatgggaaagaacacatcaaggttaaaggtgtaaaggaatacgttgaatactaactgaggacaacctgaagatgataatgggaagtaaactgaatgtaaagaaagtgaatccgagttgcttgttcgtgagagctattcccagttatgaatcaagtgatatgttcgaagataatctacagaggtcagattaaaatcacatctaacaacgaagcctcagatttgataggataatgattagacaataacaaatccagcagtaaagccatttgggaagacgtcaaagcatatcaagtgggataagttggttctcttgggaagcataattcaaaggcaaagttatcgacccttgcatcaaatagcagaagtagctatcacccggagaccaggaaagctaatatgaggcagttggtggcaagttagaagtaaatgacaagcatggtattctcatgatgacaagcatggtatcttagtaatgacgagctgatctcgacgcatgacatgaagcgggtaacttgtatgaggttgacgccaaagatatgaatgataagaagttctagaaccgaagccccatcctcaaccaccgcagcctagtctgggtcagttagaagttcaaccagggacaagtcgggtgaagagaagattccatctgcaacaggagatcgagccaagcgttctagagtggagaagttttgttaggcaagttggttatagaaaacggagcggaagaagtcagacaagaagagaagaccgcccaacctatcttcatgctagcctcctcgaatctcgaggacgagattcttgtaaggggggtggatttgtcacgtcctgataaattcatcccgaaataaaaatcattctctaaaaggaataatagaattaattaaaatttgaaaagaaattggcaaacattaaaatacgtacaagaaaaattcaaatgtgacccggagaatttttgttaaattctccttcgtctaaaaggagccctcaaattttagtggaattctcagagcacaaataataattattaagaaataaacaaagttaaaatgattttataaaaagaaaaaccctaaaaagtctttcccccccttttcccctcttgggccggctcggcccatccctttctctctctctcctcttccccgcggcccatccggcctcctccccgcgcgcgcgccgctgacgggtgggccctcccgccaccctcgctaacgggtggggcccacctgtcatccctgtcctcccgccgctcccgccgcctcgcccgtgccctagcgccgccgccgccgcgaatcccgccgcctcccgccgtccacgcgcacaataaagtggggggaaatattccccgtgattccctctctctttccccccatttctccctctctctcccgcgttcaaacgggcggatttgcccccgcaaatctcgccggcgccattgatggcggccgacctcccgcgccggtttcctcccttccccggccaccctctctcgcccccggctctatataaacactccccgtgcctctctccaccgtttccgccactcgccgctctctttccccgtcggaatcgagctcgcgccgtcgtcctctctctccgccgtcaccgccgagctccggttcgtcgccgtcgttgccccggaccatctcccgcttcggcaccgcctccttcggcttcgctgcatcctcgccgacctcgtccacctctccgtttcggtcgccgaccgccggaacgccgccgtccccgtcgacccgagccgcaccgccgcctctctccgctccggtcgccgttcccgtcgtcgccatcgatccagggtgagccatggaccgcccatttcgtttcccccttccctcccctctctcggccgccgctccgccgtgcctatggccgccgccggcgaccataggggcgcgggcgcgccgcctcccgtcggccgtgccggcgaggccgccttcgggcgcgccccgcggctgccaggtggggcccggccgtcagccgcccgcgcccccgggtgcggctgacgcgtgggacccacggcgccggccggcgcaagccgcgtgcacccggtccaccgtggaccgtgaggctgccgcgtgggccccactcccgtggacccggtccgcgcgcccctcccctcggctgacgcaataaatccgattttaaattaaaatttaaatgaagaaattcgtaaatatccatttaaagagcatataaacttcaaatggccataacttggccatttgaactcggaattggaccgttcaagtctctaatttttccttaagaagtcaagaactcatttttgtgctttgtttctgcttgctatatggagtttagtagagtaaaagccgtttcttttccgttggtcgtgtagacgctgcagctcggaagatccgctcttcgtggaagttgaagccggcgtttgggaaagcgagcaaggcaagtcacatcatccttgaacatattgaatcccagtttataaaattattttgatttaaattattgcattgtcgctttatttaaattcccgcgttatcactgttttatttagccatgcctatttacctttgttatgaccttattattattgttattgttattattaccttgttcaccctagattaaacaaaaccccaactagtggacactctactcatagtaccactagtataattttaggtagatgcttcgctgattaattaggtaacattaggcggttttacaactctagactttgggatattcatatcacctggacactttggaattgttggtttattgtggaattggattcacaccgccccctctattcaaaatccccaaaatggttttaggctgggctcggggtgcatggttttgatagtagcacctcggccatataaggaccggtcttcgggcctctgttgcaaagcactaccgtacttccacatgtctagtgggtaaggcttagtttgtggctcagtctggttataaacaaaagtacacggatggagatggacgaagtcgggggtcgatggacatctctaggacaaatgaaggctacacgagctgcggcccggtagtcgagatgtcatggcacagggctggtgtcctgctgctaggggctcaatcctgcctacctgtcccggaggttccggccgtaggtgggattgggtcggtactcttgtctatggctaggatgggttgggaactatgtcacgtcttccgtccgtataccgtggtggtatgtggcacgtggttacacgtgaggaagatgtgtcttgtgggtaaagatgtacacctctgatcagagtataatctattcgaatagccgcgccctcggttatgggcaagccaagcaatgtacccaagttagtgttttaattcttaaaatttgctcaacaactaaaatgtggaatggttggcctgggttggcttgggacgagctgggactcagggtcgggttgccagttcggtctgaatcatcgtaggccttgggttaaggcaggttcgtgagggttcacggccttgattaataatattgtgtagctctaggatcgtcttataaaatggctttgggcaactaagtgacttttaaatgctgttttctgcaaagcttaacccctatattattaccccttgtaccccctttgcattaatcatgcatctgccggtgtggctcgctgagtactgtggatgtactcattcttgctcaatcttttccctcttcagtaagagaagctttggagaagaagtcttaggtggagtcctggcttataccccagttgagcgcctgtgaagatggagccgtaggcccgctagtccgctgctgtttatttttgattgtcaggccttaagtgcctttgtaataatgtaaatattatcgatataataaagatgtgccttttgtatcatgtttgttcggtgtaccccggcttttcctgggacggagattaatacactagcgttcgggaaaaggtaaatttctcggtcgcgacaatgtggataccccaagacaacgcacatgccccgcagctccaaaacgaagccagtcaagtccagtccacgacgggtgatgctgccggccatctacaaacaaaacaaaatagaaaagcaacattttaaagattagattttgacaataaatgaagcagcaggacagagaaagactagaggattttcacaaataagaaaggatttttatttcgaaaatatcgctaaggcttgggatctacggctcgtcctagggtcaagggggctctgataccaacttgtcacgaccggaaataacccaacgggcgttccttacgtgcgtgtattattccttgtcccaggaggcaaggtacaccaaaagttgatacaattcagagtttaacaagcggaagcgtaaatagttatttattacatgggcagcgacggcccagcacactcaaagacaacgaaaaacagcagaagactaaggcgacgaccacaggcgcttgacggcaggcacgagctagacaccaaagccttcatcctccaggggctcctctgctgggtttgggaaaaattaaacaagactgagtacaactaccgtactcaacaagacacacccacaagtgcagcataattgcaaaggagtacaatggagttataatataggggttaggttttgcaataaacagcatttaaaagacccatagttgctcaaagctaaatttaaaacacgatcctagaactatttaatattattaatcaaggccgtgaacccacacgaacctgccttaacccaaggcctacgatgattcagaccgaactggcaacccgaccctgggtcccagcccgtcccaagccaacccaggccaaccattccacattttagttgttaagcaggtttgaagaattaaaacactaacttgggtacattgctcggcttgcccataaccgagggcgcggctattcgaatagattatactctgatcagaggtgtacatctttacccacaagacacatcttcctcacgtgtaaccacgtgccacataccaccacggtatacaggcggaagacgtgacatagttcccaacccatcctagccatagacaagagtaccgacccaatcccacctacggccggaacccccgggacaggcaggcaggactgagccccctagcagcaggacatgtcacgcccggaatttctatccaaaattccaaacgcttacatgtgtgtgaaccctcgtccaggaatcagccgaggcacacaataacaaattgataatagagtacaaatattactctaattaataagcgaataaaatgtcattacagaggtagatagttcctctcaatcaataaagttctaagcagcggaaattaaataaacggcgcagacggctccactccacaggcagcttgaccaaggctacacctaatcctccacaccatcagcctcattgtagaactcttcctctgatgaatgattgcaaggtgagtatatgacatactcagcaagccacgcagcaaatatgcaagtgcacaggataacaaaggatggcataatagggttccatttgcaacagcagcatttagcaaacatttgagaatttaacaaaacagttgagtaataattaagcaatattaatccaacgctatacaacataccctgttgtataggcccaaccattctgaacaaccaccccggctgcacagttctatctccaaaccaggaatgtaccattccaaaccaggagctaatcaaattattaccagttatagcatcttttactatgatgagaggtgtgagactaatcacgaaagacattgttagacccgcccataaccgcgggcacggctattcgaatagttttactctgatcagaggtgtaccactgtacccacaagacacaaccccacatcatgtcaccatgtgcctcaataccaccacggtatctcggaaaggagttgtaacaatacccctcgcataacacaatccactgcagcgcaccttcctggatcataatcacccccttataaaacaaggcatggactccccagcgacccccgtgggcttatctccgccacttctcagtctggtgccccgcaatgaaccatgctatacaaaagataaagccgttgcccatgctggcttgtggttggcacgataaatgtttcacaaccgaaactcgtgaaccggtccttaattgccatgagcacgaccatcaaaaccatgtgctcacaacccaccattaccaggttttagttggcacattaattaattaactaatcacgattgaccatcgtgaactatcaataagccatcatgaaataatagtgagtcattagttatcccataagtgtactaatgtttctaagcagggctaagcaattgtatctaatatctagttgaaccaatataattaaagctcaactagtcaaattaatataccccaaggtatcaaggaataaggtaatcaatgtacaaaagggccataacaaagaataggtcaattccacccaatgacattcgaaaatagatgcaatagttgaatagaaacaatagctttaaataggatcaacatgctcaaagggttgtttgggatctgtgtgacttgccttgctggccttggaactcttcaaactcttcttccgcgaaaacggactctccggaaacgacggaatctaagcagaaaagagcaaaatcaccaaaacagcacatgaacaagcatgaacagtacatgtggatatttttaatgtgtagatctcaattttagaaaaatttagagacttgaaccaactaaatcggagctaagatgaattagttatgaatttttaaagattaaatcggattaaaacacttaaatcggtttaaattgaattatgacgcaataatgaattatttttgaaaaggaaaaggggatttattgcgtcagcgggctagggtttgggtggaccggcgcacgggcggcggttcacacgaacggacggccaagattgatccgatccaaatcggacggccgagatcgatcggtctacgaccggctcacagcgaacggccccgatgacgtcagcgatgacgtcaccaccggcggcggcggctcggcggctcgggcttgcatgctcgccggcgaacgacggcacggcgacgcggacggaaggcaccaacgggtagcggacggcacggcgaactcaccgacgaccaaagcgacggcggaggaccaacggacggcgacagcgacgaggttgaaacggcggcgctcttcggcttgacgacggcgacgatgctccggcggtctccgacggcagcgaaggggcggacgaggacggcggcgacttgacgagcacgacggcggtcttcccgagtggcggcgacggctggaacgacggcggcgcacggctggagcggcggcggcgacggcaaagctagggcacacggcgctagagctcttccgacgacgagaggcgaaggcgagggctgcgacgggtagaggagacaccgggggtccttttaaacgggctcggaggcggcggcgaaggcccacggcgacggcaacggcgaaggaaaccttcggcttggagagagggaaaaccgatccgaatcgaactcgattccaaagctttccaaagcgattgagccaaagattccaaaggagaaaaggtagaggagatcccggagatcatttcccctctattgattcggccggagaaggaaaggaacggccggatttggaaagggaacggcggcggcgctcggcggcggcgcgctagggttccggcccgaggaagacgacgactccgacaggcgggacccacctgtcagcgacagcgagggcgcgcgcgcgcggcggactgggccggctgggccgaggagagagaagagaggttttgggccgactttcggcccaaagccaaaagaagactttttaaaacctttttcaatttaaattattccttaaatgcaattccattattaaaaatactttcttagctcaaataaatcccagaaaaaatctaggaattatagaattaagcaaagtatttaatgaaattttatctggcccaattttatattggaatttattaattaaacttagattttcttttcaagacttttaaaataaattctagaaattccaattaaacaacaatttatatattttgaattttcagggtgtgacaggacaccggccctgtgccatgacatctcgactaccgggccacagctcgtgtagccttcatttgccctggagatgtccatcgaacccccgacttcgtccatctccatccgtgtacttttgtttataaccagactgagccacaaactaagccttacccactagacatgtggaagtacggtagtgctttgcaacagaggcccgaagaccggtccttatatggccgaggtgcagcggccgagagaggggagggaaagggggaaacgaaacggcggtccacggctcaccccgagtcgacggcgatgacgaaaacggcagccggagcgaaggaaggtggcggcgcggctcgggtcgacggggtcgacggcgttccggcggtcggcgagcgaagcggaggggtggacgaggtcggcgaggatgcggcgaagccgaaggaggcggcgccggggcgggagatggtccggggcgacgacggcggcggaccggagctcggcggcgacggcggagagagagtgcgatggcgcgggctcgattccgacggggaggaagggcggcgagtggcggaaacggtggaggggagcacggggatggtttatatagggttgggagtgagggagggcggccggaggagaaggaaaccggcgcggaagatccggccgccattgatggcgccggcgaggtttgcgggagtgaatccaagcgaatccgagggagagagagagggaaaaacggggggaaagggagagggaatcgcggggaatatttccccccactttaatgcgcgcggggatggcgggaggcggcgggattcgcggcggcggcggcgctagggcacgggcgagcggcgggagtgtcgggaggaaggggatgacgggtgggccccacccgtcagcgagggtggcgggcgggcccgcccgtcagcggcgcgcgcgcggggaggagtccgagtgggccgcggggagaggagagggaggggagggagctgggccgagccggcccaagagggggaggggagggaaagggaactttttagggtttttctttttataaaacctttttaactttgtttatttcttcttaattattatttgtgctctgaaaattccactaaaatttatttacgcattttaggcttttaggaaatatacaaaaatcctccaagccttatttgacttttatctttgcacattttaatttttgaaggctttcacatggattttaattattctaatcataatttagaggatgtattttagagtcgatttgggacgcgacaattattgatcaaataattactgaactgttctttgtatcatttaggaattgagctctgaaaaaatccgagaaaatttcagagagttgacttaatcatggagaatttaataaaaattaaatccatccatgctttagatttaagaaattttatttcccacatttaacttcacttgtaaaattaaagaacacttaatataaattctattattaatttattaaataatttataaatcctgaaacgaaaatcaggatgtgacaaactacccccttacaaagaatctcgtcccgagattcggaacggctagaaagaaaaagggaataggtaaactgcagtctatcttattccataactccgataatcattctaaagctttaaagaaaactactgctgctttgaaactggtggctgagctgtaacacttgaaaacacaactcttgaagacgcaactggcactgcattggctcctgtgacaacaatgttgttgacctgaccttgcgactgctgactagtagactgtgataacttaacagtggttgggttcgatcctgtcatgacaggcagcctcagtgaattggtgatttataataagccagatatagacgataataatcatcgctgctccgtagcagcacatttgttcgcagcggtgtcaacgacgaaggcaatacctgttggttcattccaacagcttaagaagcttgaggtggacagcatctcagcggtgtttgttgcccccatttgcagcctcctcgcttccaccctctacaggttgaggttcacttatgatttgtggatgaaaaatttcacaaaagagcaggagcaggcacttcagctcctcacctccctccgaaatctagaattctatgagtgccaccgtctgcagtcccttcccgaagggttgcatctcctttcttctatctgcacattaggcatcgtcggatgtcctgaaatcagatcgttgcccgaggagggcatcccagcttcactgaaaaaactactagcaatgcgttgcagcgtcgacctgaaggatcaactcaagagattagaagaatcaaaccaagatttacaagtattctacatctgatcacccaaggtaagacgtgatgtcccaactcctttgttttttactctttcatctgcagttgttcatatttaaactcttttttacctgttcgttgttactgttgatcatctagcgagccaccactactctcttttgaacaatgaagtgcagatacacattctaaagtcatttgaacaatgataaaaaatcaaatccgatgggaaaaaacaagaaattgctagaacatgttggacaatcgccatcttttcttactgtgcgcaacaagcctaaccttggcattatggaaactttgcagtaactttgcagtaattagatcgtggatgttctgtacgttgctttattgggagtgatgaccaaaccatttgccacacatagcttgtttttttcaagagaattacagttttgattaaggagcaacacccaaatgattgtggagctaacctcgtttgtctctatttcatcatatgttatgttacagttttgattaagcagtattagatttagatgagagcaactgtaattgtttatggttctggtaacacagtttcatggtcattagtaggagaattctttgaccttattaacttgttccctttcagcaaagcattgtggaatggtgttttttttagcctattcagaaccagttttttacataatggaagctttattaatctcagtaaatttcatcaagtgatacaattattctgagagcacattcggcttctgcaccaaagagtacacacagccaacaagaaagaaacaaaagataaactcatcatccaaaatagcagaaacaaaaagaactttaggagcccgctaaccgtagcctagaacgtcacccatgtgctggggtagaaaactactatatggccactaactctaattgttgacaaaccgcaatgatagtaccctgcaaattgaccttctgaaggatagcctatgagcggagccaatgtgtaatcaaaaagataacctgcaaaggagaagatatgttttttcctttcaaaaaccacattatttctgaaaagccaaatagaccaaatagtggtagttgcacctaataagaccaaagatctcaaattgcgtgattgtcttcttatccaatgcccaaacatatgagttgtactattagataaaactaatattcgaagcaaactgaattaaagaccaaaccgcgcgggcaaaataacaatcaaagaacaaatgattaatagtttcatctttgtggcagaaagaactagacttgtttcctctccaattccttttaatcagattatcttttgttaagattactccatggcgtaagttgtcacgcccgaaaattcactagtaatttccgaacttatttgtgcataaaatcctcgtccaggaatcagccgaggtacacaaactaacaatttaatatacagattcatcaaaatatctaaaacgataaatacttactaaagaggcacttagtcctcaccatgaagaaaactgcagcggaaaaaaaaaaaatctagcgaagctccggctccactcccacaggcagctcaactggggtataagccaaacgtcttctccttctggatcctttttcttcaactgaggttgattgattattgcaaggtgagcatatgacatactcagcaagccacacagcaaatatgcaagtgcgcaaagataccaaaggttggcataatataggctcatttgcaaaagcagcatttagcaaaacatttaagagaagtaaaacagtggagtaattaatcagaaattttaatcaacactgaacaacacgcccatgctgctcaggcccaaccattctgaaacaaccatacccggctgtacagatctaatctccaatccaggagctaagcaaattattaccagatataacatccataattattgtgagaagtgtgggactaatcacgaaaaacattgctcaacccgcccataaccgtgggcacggctattcgaatagttttactctggccagaggtgtaccactgtacccacaagacacagccccacatcatgtcaccatgtgcctcagtaccaccacggtacctcggaaaggggctgtgacattaccccttgcataacacaatccaccgcagtgcaccattcctagatcataatcacccccttataaacaaggcatggactccccagcgacccccgtgggcttatctccgccacttctcagtctggtgccccgcaatgaaccatgctatacgaaaaggtaaagccgttgcccacgctggcttgtggttggcacgattaatgtttcacaatagtagctcgcgaaccggtccttaattgtcatgagcacgactctcaaaaccatgtgctcacaacccaccattatcaagttttagttggcaagtaattaattaaccaatcacgattgaccatcgtgaactatcattaagccatcattaaataatgagtcataagttatcccaatagtgtgctaatgtttctaagcatggctaagcaatcatatctaatatctagctgaaccaatatataaagctcaacttgtcaagttataataacccaaggtatcaaggaataaagtaatcaatgcaaacaggccataacaaaggaataggttcacaccacccagtgacattcgaaaataaatgcacagttgaaataaatagagaatttaaatataggatcaacatgctcaaaggattgtgtttaggatctgtgtgacttgccttgcaataatcggtcttcaattaatcttcttgaacacttccggcgcactcacgaaccttcgcaacgacggaaacgacaagctaacacgcaaaacgaagaaaaagactaataaaaaccaaataaacagtacatataaagtaaacaaacatgtagatcataattttagatgaattatgagacttgaacggcctcattctgacttcataagaatttattatgaaatttacaagattaaatctaattaaagcccatttaaaaagaattaaataaatttaattctatttatggacaattttaatatgtagatctttattttatataatttttgcaacttgaaccacattaaactgagttcaaatgaattagttatgaatttttaaagattaaatcggattaaaacacttatatggattttaattgaattatgacgcaataatgaattatttttgaaaaggaaaatgaggattattgcgtcagcggctagggtttcgcggtggaccgggtgcacgacaacggttcatgggaacgaacggccgagatcaaccctatccaaaacggacggtcgagatcgatcggtccacgaccggctcacggcggacggtcccgatgacgtcagcgacaacgtcagcgatgacgtcagcaccggcggcggctcgggcgcgtatgctcgccggcgaacggcggctctacggcacaaacggagggcaccaagacgtagatcacggcgcggcgaactcaccgatgaccaaaacgtcggcggaagaccaacggacggcggcggcgtcgaggaaaaggcggcggagaagatcgggtcgacggcggcgacggtgctccgacggtcttcggcggcggtgaagcggtggacgaggacggcgacgcgacggcgaccacgatggcgatcttcccgagcgacggcgacgtctggaacggcggcggcgcacggctgaagcgacggcggcgacggcggcgctagggcacacggagctagggcgctacggacgacgagaggcgaaggcgagggtggcggcgggtagaggagacaccggggatccttataaaggggctaagaggcgacggcgaaggcccacggctgccggcgacgagaaggaaagatcggggtttgaaggaaagagaccgatccgattcgaactcgaatcaaacacattccaaaccgatttagccgatgtttccaaaggggaaaaggtggaggagatcccggagatcgtttcccctcaatcaatttcaccggaaacggaaaggaacggccggatttggaaggagacggcggcgcttgcgctagggtttcgggcggcggcggcggcgcgaggaggaagacaggcctgacagacgggccccacctgtcagcggctgagagagaagagcggcggctcggcggactgggccggactgggccgaggagggagagagaaagagagagggagggttttgggccggctttcggcccaaagccaaaaaaaaaacctttttcaatttaaattattcatgaaatgcaattccatttattaaaaacacttccttagctcaaataaatcccagaaaaatctaggaattatagaattaagcaaagtatttaacaaaattttatctagcccaattttatattgagatttaacaaattaaaattagatcttctcttttaggcttttaaaatcatttctaataattccttttaaacaacaatttataatttaaggattttaaacaagaaaagcacttaacaattataattagatcattattgatcaaataattactgaactgttctttgtatcatttaggaattgagctctgtaaaaatccgagaaaatttcaaagagttgacttaatcatggagaatttaataaaaattaaatccatccatgctttagatttaagaaattttatttcccacatttaacttcacttgtaaaattaaagaacacttaatataaattctattattaatttattaaataatttataaatcctgaaacgaaaatcaggatgtgacataagtaccataagaagatcttaatctctagggaggactttgatcttccagattcttttgtttatattgggaacatcggtctgcaccaacgcaagataaagagatttaaccgagaatctaccatcagtggttagattccatttaaactcatctgggtcgtgagataatataatattagcgatgcgtgagagaaggtgattccacgctactaacttagagccagtaaggtccctgcaccaagaaaagcttagaggactggtctggaaaatttctgaaatagttgcatgtttatgcctaacaacgttatagagatagggatattgttctctttaacaggcattcccccaaccatttatcttcccaaaaccgtacttgagagccatctttgatgttgaaagagccaaacctaataaaatcaggcttggccttcattagactagcccaaaagtgtagcgcccgttccgtcgtggcgcctagcgggaaaattaactcttaaaaaccctaattgcgaaatttgtttccttgcttgttgtctagtgtccgtgccatctcaagacctcaatccccgatctatcgtcgagttcaattccgaatccaatccttccaatcaaattccaccgcaaaaagtctattttgcctcccccgaggtcgatgggccgaatctcgctcggcccatctctctctcccccggccctctctcccgggctctctctctctctctccccccccccccggcgcgctcctctccccccccccccccccgctggctgctcgcgcgtgcgagagccgcgccgagcgcctctctctccgctcccctccgctccgcccgcgcgccgcgcgcgcgtgcgcgggagtcgcccgcgccgagcgccccccacccctcctctcgcgcgagctccccactcgcaaagccggccccgcgcgccgttgctcgcgcgcgcgcccgcgtggtttcccgcccgagccgcgtcgtctgcgccgtccgcgtcgcccggtcccgctgcccagccgcgccgcccgttgcctcccgcgcgcgcgtgccgtggtggccgaccgcctggtcgccgccgtcgtcagcgtctgccgtgtctgtcgcccgtgtcgtcgctccgctccaatccgcccgccgtcatcgccgtcgtcactgcccggccctcgccactccgcgcgcaagccgccaagaggcggaggccgagctctcctttccctctgccgcgtcgccccgctcccctcctcctttttcccaaatcggcaaaggggcaagcccccttttcccccctccttttcccctttttcctcctcgccggcgtcatcctccctgtcgccgctttggccgcgaccgccgatcgccagctcgcgcccttgaccgcgcaagtcggttctcaaaccgacattgccgcccatttaaaccccagcctccccctttcccttcctctccctttcgtctccacgccattaccgccgcccccgtgctctgtctcgcctccgccgtccctcgccgagcgccaggagagccggtgcgttcgaggacgcggaaggggacttcggccgcaccctcttctttctcttccccttccccggcccgaggccggagagatcactcccgcgccgtcggcctctcgtcacagcgcccctcctccgcacggtagtgcctctctccgttcttcctcctcgctccatctcccccctagctttcggtagtagcttgagtagcctccccgtagttagccggcgccgccccgaccgttgccgtcgctcgccgtgtgctcgccgccgtcgccgctcgagctccgtagcacccgcacgtcgccagcctcgctcggcgtagctccacccaatccgacgctagcgtcgagttcccgtggccgcgtggatgctctcaccgccgggaatcgacccctcgtggcctcgtcgccgtttccctcttctcccgccgccggttgccgccgccgcaatccgccgacgtcgagcaacctccggcgaatccgagccgttggctcgcctccccttgtcacgtgcaaccgcccggtgtgctcgctgttacccgtatcgccgtggttcactccgccgctcgccgccgccgcccgccgtccattcgcggccgggtcgtcgtctacctcccgccggcccgcgtggctgccacgtaggtgccacgtcggcgccacctcggccgcgaccggatcagccgacccggccagccgctccctccgttttttcccccgtgcgcatggtccgcggtgagccgtgaggctgcgcgtgggcccgccgcatccgcgtccaccgcgaaccgcgcgcatgcaccgcgtcccttccccgcccgcgcgcgtgcgccacgtactccctccgcacggtgagccgagccgctgacaagcgggtcccacccgggaccgcgcgtggtgagcccggtccaccggactctctctccttcctcccgcgcgcgcgcgcttgggccgtcttgggccggccggcccgttaagctcggccgagccgctccaattcccttgggccgcgccttagccgcccgagcaagagtctaatttccatccctctgttctttcttttcttttctttttcaaaaaggattaaatcctttttcctttagaccaaaaatccaataatcttagaaattccatatcttttcaaccgagcatccgtttgactccgttcaacttcctaaattcctcaaatcccgagatctacctaatggcacgcttagaggtcaataatagggccttatcttcactgtttgttgagttgtcccgttttgcgtgtagtttcggagcccgaagacccgcagtgcgaggatttcgaggatcaagctccggatctcgagcaaggcaagccacctttgaacatcttgagcctatatttgaaatttaattatattgcctgcaaaatattatgcattgataggatcgcactaaatcttttatcccatctgcaagacagattggcggacttacctaacttgttgcatttgatccttccattgttaattgccatgctatgtccccttgtaaccacccagctgcacctcgatattcgtgcactccgtgcgagtatcgacggtcgccttcaaacttaaaatctgagtaacaacttgggtaaaactggagttttacaaaagacttggaaaacccgacacctgggtcggtgcttgcgaactaaatgaattttcaaaaccgcggaccggggaacgtaccgggagtacggtttcccgctctcgcacttaaggaccgaatccttggaatttcatccaaacataagacaagtatgaccacatgggtggaatgggacacccctggctgagtaactagcttatcaggggagccttgatgccaagagacatgtggattcgccggggtggtgtcggggaggacccctgggcttcctggcacagtatggtctgggacctaacctgttgttggtctgggacccctctcgtcggcatatggtaaacctgtatcggctttcgaaatgccttgtcatgaaagcttggaggtctcccgacgtggctgatccccacgggctggatgatccgggttagtaatgtcgtgtgggtaaagtgtacccccctctgcagaggttaacaaactgttcgaacagccgtgcccacggtcatgggcggatgtgaggtgattcctagcgtagttttgtttgactactgcttgtgaaattgctgttgtgaaaaggagttcgatgtttgaaaaatctgcagctgatggggtcagctaggcccgggtggccgtttgaaaagttgttggcccgggtggccgtttgaaaagttgttggcccgggtggccgtttgaaaagctgttggccggatgccaaccctggttcaagatctaaagattgatacattgcacatactccgaccggacgagacgcactgtctcatccgtgtcgtttgagaagcactcacttagtctttttagaaaagagttcaaacaaaatcaattacgaaaacaacagcctttccttgaagcctgtattaaatacttatttcccctggcttgctgagtactcctgtactcacccttgctctatataaataatccccccccagttgctgaagaagatgaagtggatcctgctgacgaggagttcttccaggagcaagtcggcttcgatgagttttaagggtttcggcctagttcccaagtcgcgcctgtgatgattggtccaatccctggcttccgctttccttttgtaatgcagttgtgagctcgggatctgtccgcagcccaacatgactgtaatcctactctataataaagagacctctgttgctgtgatattctgtcttcctgtgataccagcactgtttcctgggactggtatcggtcaacaggttaatttggagcgtcacgagctagttccgttcggggctagtccggggcgtgacaaaaagtgtgagtctcctgctttccactgagcttgagacaaaggctgtgaccccaaatatttgttccttagcatttgtagtgagtagtttatacaaccagttgctaaagaaagttgtgttcttaatttcaagattttgaattcccaacccccttggtctttaggatgacatatgatgtcctaccttgctagtctatatttccttttgtgtccatccccttgccaaaagaaccttgatcggaaataatcaatcttgttgatcactcctttaggtatttccaaaaaggacatcatatacattggtaggctagtaagcactgaattgattagtgttagtcgccctataagtgataaaaatttgcctttccaacttgccaaccgtttatcaagccgtttaatcacttccttccactctgaattacgaagtcttctatggtatacaggaatgccaaggtaacggaatggaaaaagaactaacctcacattgaaaaaggttagtatattcagaaccagtaaggagcgttcgcgaaagaaaaaataccagttaaggtaaaacatattggacaggatactgacgtggttattttttcatgggctcttgatcacttatactatcacccaatttatgttagggaaaaagaatttattctggggtatcaacccctccatcttgtactgactgccgagcattatctgcttatccaaatatactggcgtcggctcagtacaatcctgcagagtttaccatctagaaaagggtaaggctaggaacgatcacccgcccgccccttccctatatgctccatcactccctcctctccccccttcctcctcctcttcttctcttcctactacaccttatgaattcaaatttaaaattaaaacgggtatgtaaacttttgacttataaactttgggtctataaactaatatttgaattcaaattcaaatttgaatcgggtatataaacttttgacttataagctttgagtctataaattttaggtgtataaactttagatgtatagaaatattatatataaaaaaatatttgaatttaaattcaaatttaaatcggatatatttcaaattcaaatttgaatcgagtatataaacttttgacttataaactttgggtctataaactttaggtgtataaactttatatgtatagaaatactatatataaaaaatatttgaattcaaattcaaatttgagtcggatatataaacttttgatttataaactttgggtctctaaactttatatgtgtaaactttaggtgtataaatttactaaaataggaaagtaatacgatgccaaaaaaggaaactaggtggagggaggggatccgagtctgatcgcccctcgcaatcgatcgccaggtagaaatctcctctagaaaacgttttacatcctgcatattttggagatctttgcattagctaaatctgctttccttcagttcaatctacagaacagttgttgcaatctgatgcatactttccccaggtacttgcttccaagacaaaagtggttcccatccaacttgcaacggaaaaacagttcatatctttatatactattaacagagccgagaaggaatcctccatgtaccatctgctgatctgcacggtcagttggttctccgttcccccttcttgttcctactgaagatcaagcacaaaaaaaaataataataataacaatcctggtgactcgacaatcttgtttgaggacactttgtaatctgtctcatggtgccatgtatgcgtataggtctatgcagatgatccagtcatgcatgtaattgtccggaggaaatcatgattctcaacggagtatcatgtcattgcgacaccggatgggcgagcaagaggcgtcaaggttgggaacagagccgtctccgccgccgtggtagctcgccgtcgttgatccggcgggcccgagcttgccattactgaacccggcgaacctggcctcgaggctgctggctagaagaggggaagaatcacgataccattggattgaaaaccaaagcatcggttgactggtgaatactagcaaaaaaattgatgctatgttcagaccatatgttatctgatatctcatatgtgaacaatatcactgaatatgagtatatgcattggtttggtgactatatatgacaatgtgtaattgaagcgtgtatcgtttcttcttgtttttttttttgttacacacttacactgaacatttctgtaaacagctagctaccaaagtattaacagcccatgttagttgactggtagcaaaaggatgatgtgctatattcagagcatatgttttctcaaatgtgaactgtatcacagattgtgcttgcccaagcatatccatggattggtgactatatgacaatttgtaattcaagcgtgtgttgccatttctttggttacctggaacatttctgtaaataacttctataaacttctctcctttattaatgagctaggcaatcctttagcctactttcaaaaaaaaaaaaaaggtcatctggtactacaggttttttacatcagtcacaacacacacggtcatctaaattcatataaataaatgagagaaaagttatcaattacttcatccggtcataaatattttatatttgaagacaagattcagtctaactattaattttttttaccataaattttatattagaataaattgaataagttgaaagcaaaagtatgcataccttttttgaaaaaacaaaagcatttgacaagttattagtgtttaaagttttaaaatattaatttaatcttgtcctaaatgtcgaatatttatagttattaatacagatatgttaaaaaagcagaaaaaacctagccaagagtgggccccagttgggccaaatcaacagcacaaagcaggggaaaagtacaccgaaggtccctcgacttgtcatcgggataaaaaacgtcctcgaaccgcaaaaccagatacgcgaggtcccttaactatacaaaaccgttcacccgacgtccttaggtggttttgaccccggttttgtcctacgtggctgctgagtcagcgtgggacccacgtgggccccacatgtcaggaagccacatcatcaccttccctctttctgggcggcttctcggcgaggcaaagcggcggtgcagaggtcggcaggcgaggcgggagagaggagggcggcggcagcgcgacggcggccggagcccggggggagaagggtatggcggctgcggcggtagctaggggggagcgcgaagaggacgggacgatgtcgcgccgtcgcccacacctgccgcccctcgtgctcgtcgcgctcccacaccggcacgccgcgctccacatcgtactccgtcacgacgccgtcttagtcgctgcaacccacgtgcgccactacctcgccgccgccccggccgccaccgcacgctactcagctttgccgggatgtagatgcagccgacggggctagatggctcggcgaccctgtaaatccggatctttcgggcgatgccgccgatggcgatgtggtggccggtggggtcgaagtcgaggctgtcgatggagtcggacgcgcccgtgagcaccggcgacggcacggtggccgccaggcgaaactccattctaacctcggcagcgatagcttgtctgccttgtcatcgggaataatgtcggcttgtccacctccgcacccatcgccgctgcgctagccacctcctggccccacctccgccgtcgccgccgcgtggtggtggtcgctgccgtgctcctgctcctcctgccggacgccgcgcgcaagcagcccacctccatggcacccgcaaggcgttggcgacgggcgacgcggcggcggaggagcagcgcgcgggctcccccgccggccgccacccacgaggcaaatctccatctctccccatctcgcgaccgctctgagcatagctgtgccactgccccatgctcgctgctgccgcgtcgttacgtcggcaacatcgccttccacgcccccgacgctgagctccgcgccgccgccgcccgcagatccttcccccgccgccgcctcgtggacctcgtgggcggcgggcggcgggggagcccgtgcgccgctcctctcctcaccgcccgctcgctgctcctctgccacccacgcgtcgcccctcccccgccgtccgcgcgcccgccgccgccacctcgtgggcgacggccggtggtggagcccgcgcgccgcttctctccccgctcctgcgcgctgctccgccgccgcccgcgcgccgcccctccctcgtcgcgcaccccgcagctcatccccccaccgccattgcgtcgcccgtcgccggccgccgagaagtgagagagagcgcctcacactgctgctcagaagggagagagcgatgaggaagggagagaagagggaggaggagggtgatgacgtgggttacgctgacaggtggggcccacatgggtcccacgctgacttagcagccacgtaggacaaaaccggggtaaaaaccacctagggacctcgggtgaacggttttgtatagttaagggacctcgtatatctggttttgcggttcgaggacgtttttgtgtcccgatgacaagttgagggaccttcggtgtacttttccccccaaagcagtgcgatgtctagagcatgcaatcaatggcagccagaagtggcccaagatgtagccggcattcgggtatttttctctcaacaattctcacatgttccgaaagattatattggcatgtaactaggaacgaataaagtatgatgaaattgactggaatagcaaccaagacctgatttacaacatctactacaaatgttttgcaggaaaaagaacaacatctcctccatatcagtgtttaacggaggataaaatattaatcggcgacgctgagatcgtttctgtgccctctttttccttcttgtttcccagccaaaagaggttgtcttgtcgagcatgattagtaagaagtgaacatctttaatcatttattcacttttttaatcctttattccctcactgttagcgtttgtcttctctttttttttttcctttatggatgccaaatttcgaaagaacaaaccacggaaccataagcatagaatctcgcctttttcttttttcttttctccaacatgggagtgaaatgccctgaaaaggggcatgagtgatactatgattagccaaagcaaccatattattcaagttaaatatggtttttaacgttgataccactgataaagtcgtccagtaagagcataccagattatgcagaattcccgtgaggcttatgtacagatgtactaaatatatatttctagtacccatatggctgaataaagctaatgcttagtacgtattgaagaaaaggcttccatgtaatcacaggtactcaacattaacaatctttgcagcatgagacagcagtgtgcaaagagccggcaaaccaacaaagcaaaagcagtaaactgaggtaaaggagtggccaaggcgaagtatggacctaaccaaagaagcttcggcaccagatatgatccagacttgacagataaatgccaggaggatgtaggaatcaccaagcacaagcacatgacacaggaaagttataccctcaagtgcactgccttaaaagaacacaagcatgaagcatcacatgtacttgtaaggtagccgatgtcgaaaatagtcaataatcaagaaaagaaaagaaaaaactggacttctcagttaagcaaagaaccttgaatccttgaatgcttcaacacccctcaatcctcataactcatgagggcacaacaaacagttgtcctttcaacactcctcaatcctcataactcatgaggacacaacaaacctaacacagcaattccaatcggctgacagaatacagacttacaagcattccatccatctctaatgaaaaatccatttacaggtttagaggtatgacgtctattaattggaacgtagtccaacacgtccaaacgaattaacaattagtatcctagtagcctgaaacatagtccatttcgtcataaagaatgattagtgccctaacaaaaccggtgaaaactggtatttggtcaaaacttctgtacaggcaacagcaagtgacttgatgattcctcaacctctggctaggtacacttcgagttgctttcctttgccactctgtagtgagctcccagaatggtaactgtgcctcctgtaatccattgctggagatttgcttccaaaggcaacttgatgcagctgcaagaaagcaaacatacttacagcaaacgctgcagcgttacccagagcactaccgattttgtccactcgaaatgagttcttggccaaagatagactacaagataacacattccccataatacttgaaccgttgctcccactgtccattacatcctcccctgactggttatgagttgcacgaacatcttccggtgagatgaatcgactcttgtcaccaacttcgcctacaaacgccaaggcctcatcaatgactctatacttcttcccctgatgttcagctagcctcatggcaaggactagtcggctctgttccaatctagcaattgcagcatcctgctctgcccgctgttgtgattgaacggtctgtggaggaagaacaatattaacgactaagaaacacaagcttcataaccataccattaagtaggaaagatagaactgaattagctaaacacacagggaactgtgcattgcctatatgtatgcacaggtttccaacccaccactcataaaaggacagtaaccaaattatgctcagaactaactaaaatggaacatgacaaagcaagagctacttcactctgtttcattctggtaaggtactacagcaaaattagcctctcttacataccttggccaatgttatgctgaacttttaaccagtgatgaatgattatagaacaaataatatcttcaagtatcatattaatcatggttttatgctatgaacttttatccagtgacaaatgactacagaacaaatgatgttttttcttgcctagacaaatagcaagcatcaactaaaaaaacaacaaaaaagagaataaagccatgtggactatcacttttttaacatccacatgccttcatttccaatctatttgcgccttaattagcaaatttatagtcaaaagcatatgcacaaccaaacacccaaagaaaaaggccaaaatccagcacccatgacatgatattaacaaaccacataattcagcataactcatgagcagcaactcaatgatcctaccatgcgaacagcatgatgcaatcaacatccaatcgaaacatcaaacgaagcgccaggtggatagcaacagaagctagctcccatgaagaaattgaaatcattagccccatctcaaattacagtctacaggccgcgcaatgaaaacgaagctaaatgatagccgcaatcacgtgaacaacgcactctcccccagcctgacgaggatccattcccccactcccccattcattgcaacaactcatacatggtcctccaggtaaccaatccagagcaaaaaaaaaccctagaagaacagaggaaggggaggaggcgagcgcaatctcacatgaaggaactcgaggtgctcctcgaggtcctcgagcgccgtccgtatggcgtgcaggctcctcgcctccgccatcgcctccgccgccgcggccttcgccgagcccacgcccacaccatcccccaccccgcctcctcctcctcctccaccccccttcaaccccttcacgaacacgtacccgttcctcccctcgcgcgcgggcggcgccgacggctgagacggcggcggaggcggaggaggcggaggcggcgggaggaggaagtgcgcgcgggagacggcgaggatggcgtcgctgaggcggtcgtgcaggtcccagatccgctccagcacctcctccgcctccgctgcgtcccatctcatcttccccccgctcgccgcgctagggtttgcgaggtcgccaatggtggagaggaggagaggaagcgaagcgaaagggagggaaaaagaagagaggaggaagagggggaggggcgatggtgatggcggcacgaccgcacgaccgatgtggagagagcgagagagagagagagagagcttttttttttttgatgcaaatataaatatcacgtttgtttggatgcgtttgatttttacctttttatttttgaaatgggaacagaatgatttggaatttcagttgacagtgacaagttgaggagcataatcctatggacaatttcaattgggtataaaattccagctaggatatttcgattttatgagttttatttattctgatgaaattcatgtaaaatttgtcatattatgcgattttttttgtgcggtccaaaagaagttttaaaaaaatattcacggaatggaggggcctatagggtagatggatggattcgtcgcccccaaagaaaaagggtggaaagtagcaccatttcgttggatctgagctgatttgcaggcaggtagttggaggcatcatttaaataattcaaaagaggattaaataatattactatcgtactataaatattgcagaaaattgtgccacgcttgctgatatttaacgttgtggacctctgtacacttacgtgcaggtttgtgctcatcatgacccaacaaacattacaaccccacaattcaaaagcaaaaaagaaaagaaaaacacttttgaaagagctgtaatccagtatatttaacttgaaattttgacattttgactctttcgaagaacttattttataaatgaaccagaaaaaaaatataaccaaaagtagtcctttacctcagcgtcatgggtcacgctgaggcccaacatcctagcgccatgtagtttggcgatctccagaaaccatcaaaacaccactcaccactacaacacacaagaaatcatatgcatttagatctattactcttttcatattgtatttcacggcctcagcgccaatgtcacaccctgaaaattcaaaatatataaattgttgtttaattggaatttttagaaataattttaaaagtcttgaaaagaaaatctaattttaattaataaattccaatataaaatggggccagataaaatttcattaaatactttgcttaattctataattcctagatttttctgggatttatttgagctaaggaagtatttttaataaatagaattgcatttaaggaataatttaaattgaaaaaggttttaaaaagtctcttttggctttgggccgaaagtcggcccaaaacctctcttctctctcctcggcccagccggcccagtccgcagccgccgcgcgcgcgcgttcggtcgctgacaggtgggtcccacctgtcggacccatcgtcctccttcggccgccgccgccgaaaccctagtttcgcgccgccgccgtttcctttccaaatctggccgttcctttccttctccggccgaatcaatagaggggaaatgatctccgggatctcctctaccttttctcctttggaatctttggctaaatcgttttggaagttcgtggaatcgagttcgtttcggatcggtttccttctctccaagccgagctttccttcgtcgttgtcgccgccttgggccttcgccgccgcctccgagcccctttaaaaggacccccggtgtctcctctacccgttgccaccttcgccttcgcctctcgtcgtcggaaaagccctagcgccgtgtgccctagctttgccgtcgccgccgccgctccagccgtgcgccgccgtcgtttcagccgtcgccgtcgctcgggaagaccaccgtcgtgctcgccaagtcgtcgccgtcctcgtccgccccttcgccgtcgccggagatcaccggagcagcatcgccgtcgtcgacccgaaggttcccgccgcttcctcctcgtcgccgtcgccgtccgttggtcttccgccgccgtttaggtcaccggtgagttcgccgtgttgtcctctacgtcttggtgccctccgtttgcgtcctagtgccgccgttcgccggcgagcgtgcgccgttcgagccgtctcctccgccgagccgccgccgctgtcggtgacgtcaccgctgacgtcattggggtcgtccgccgtgagccgccatggacccgattgatctcggccgtccgttttggattggttcgatctcggccgtccgttcgtgtgaaccgccgcccgtgcgcccggtccaccaaaccctagccgctgacgcaataatccttcttttccttttcaaaaataattcattattgcgtcataattcaatttaaaccgatataagtgttttaatccgatttaatctttaaaaattcataactaattcatcttagctccgatttagttggttcaagtctctaaatttttctaaaattgagatctacacattaaaaatatccacatgtactgttcatgcttgtttatgtgctgttttggtgattttgctcttttctgcttagattccgtcgtttccggagagtccgttttcgccggagaagagtttgaagagttccaaggccagcaaggcaagtcacacagatcccaaacaaccctttgagcatgttgatcctatttaaagctattgtttctattcaactattgcatctattttcgaatgtcattgggtggaattgacctattctttgttatggccctttcgtacttgattaccttattccttgataccttgggttattacaatttgactagttgagctttatttatattggttcagctagatattagatataattgcttagccctgcttagaaacattagcacacattcgggataactaatgattcactattatttcatgatggtttaatgatagttcacgatggtcaatcgtgattagttaattaattaatgtgccaactaaaacctggtaatggtgggttgtgagcacatggttttgttggtcgtgctcatgacaattaaggaccggttcacgagtttcggttgtgaaacattaaccgtgccaaccacaagccagcatgggcaacggctttatcttttgtatagcatggttcattgcggggcaccagactgagaagtggcggagataagcccacgggggtcgctggggagtccatgccttgtttataagggggtgattatgatccaggaaggtgcgctgcagtggattgtgttatgcgaggggtattgtcacaactcctttccgagataccgtggtggtattgaggcacatggtgacatgatgtggggttgtgtcttgtgggtacagtggtacacctctgatcagagtaaaactattcgaatagccgtgcccgcggttatgggcgggtttaacaatgtctttcgtgattagtctcacacctctcatcattgtaaaagatgcttaaactggtaataatttgattagctcctggtttggaatggtatattcctggtttggagatagaactgtgcagccggggtggttgttcagaatggttgggcctatacgatagggtatgttgtatagcgttggattaatattgtttaattacttaactgttttatcaaattctcaaatgtttgctaaatactgcttttgcaaatgcaaccctattatgccatcctttgttatcctgtgcacttacatatttgctgcgtggcttgctgagtatgtcatatactcaccttgcaatcattcatcagaggaagagttctacaatgaggctgatggtgtggaggtttaggtgtagccttggtcaagctgcctgtggagtggagccgtctgcgccgtttatttattttccgctgcttagatctttattgattgagaggaactatctacctctgtaatgacattttattcgcttattaattagagtaatatttgtactctattatcaatttgttattgtgtgcctcggctgattcctggacgagggttcacacacatgtaagcgtttggaattttggatagaaattctgggcgtgacagccaatgggtctggcgttatgatgttgggcctcaatgccaaggcccgtgatgctgaggtgaaggcctatttttagttatattttttgtccaggtttacttatagaatacgtttatcaaaagggttaaaatgtcaaaattacggatgtttaactcaatgcattgtaggttcaactagtgtttgtagctagagtcacatggactggtgtagtaattgagggtatgcctaacaaatttagaagaaatcttaacacgtctagtaaaaaagcgtcattcttagatggaaaaaaaattatccctatgaagaaaagaaaatcttgtttagagaaagaaaaacatttgaaatggattgatttcattgaattgtacaaacacctaagggtccatttgatatagcttcctaagaattgttccttttgtcacaaagatagacaattttacatttgtttcatgaatgcaaatttgcctgttttgtgtggtgcactatacaagtggctacagggcttttcccgcctcgtggtgtatccaacatgtttggtaatttgctacggggaattaggaaaagccttaagtcacttatcctgttaggggcaacaactatttgttggccattaaggttttgtaggaatgatgtggtgtttgacaaaagaaaaatctattcttctttacaggttatttattctaattttttacaatttggttcttttaaaaaacttattttacaaatagacccctagaaaaacttatcccagaaatgatcctttttggagcaccagaatcactggcgccagtcatccaacgggacagtgccagcctctctggtgccgtcctcctaccaccgtggcgggtcggcgccgaggtggcagggggagtgcaccaatgtggccccaaccccattcttttcctctcctctcctctctagtgtagaggagagatgtgcaacttttttattttgtgttatttttttgatattttcttcacaagaaccaaccatgtgacttgtagatttaaaatattcttaagccttttttacatctttcatatcctataaacaaagaaaaagttcgggatagcggcggtgatactcagtggcgtcgaaatttgcattgtcgtcggggcaggggtcgaggcggaggcagacgacgaggtcggcgttagggaaggagagcgaaggggaggaggcggcggcggcgtggggagccggcgaggaggagaggatgctgactgctgagccggcgtggggagtcatccccttcaccaagattgacgctaccacgctcgcgcgccgcctgcagtggagagttcatccgccgaccttgttgacctagccgtcaaactcggcagcttccgccgtagtcctcgccctccgccgtgctacgtcttgccgccaccgccatccacttccgacacggtttgcctgtcactgccatccaacatccacatgagagagagagaggtttaagaggaggtgacaatgtaaatgacacgtgagtctgaaatttatttttattgttttactcactgacatgtgggtcccatttaggtttgttgttattttagtgccacgtaagccccacgtggtataaagaccaagtcaactcgccacgtaagtgccatgtaggacgaaaccgccccttaaaccgcttggggagtctatttgctacggttttggaagttggggcatgagttatacccggttttacgactgagggatgtatttcaaccaggggcatgagtttagggaggcgaaatagagttattccttttttaatgactacctatacatatttatgacatcataaatctatatctatatttatacatgtttaagtacttgtatatctatatttactagaaaaaaatatccgtgcgttgcaacgggtgaaggttattttaattttattattgttatacattatagttaaggtgaaagtgaaattcaatgcgagaattaagagcaattaggagtacgatcatctcaagttagcaggtaagtttttataaagagatttcttagactacttatctatttccaaaagaaacgaacttaaaacccggatcaaatacatatatgtatttccaaaagcgaacgaacttaaaaccgactcatacacgggtgacataccaaagtagcggcaaaaacatcttcaatttttataatagtttcactatgagaattcgcttggatatatatatttttctagaaaattatgagctgcaattaagagttcaatcatctcaagttagcatataagttttttttaaagagatttcttatattactcctcctgcatttccaaaagcgaaagaatttaaaatccatctcaaatacatatccgtatttccaaaagcgaacgaacttaagatccgactgatacacggatgaaatcgttggtgcataactctatccattagcaaatatgtagtaagaacaagtttgtgctgtttggtttagtgcgtttggggcgtattttggtttagtgttatgtgtgtaatggtgggtgtctgtgcgcgtgtgcgtttgtgtcttccatctaatcaaaataaagaaaaagctaagagagtgaaagctgttgaatacttgaattgcagagtaagctcccgatcatcctcgatctgataagaaactaaaatttagtcgttgcgatagttggcttggccggctaggctttttcttacagtttagagataagactttccaaacgtaaccatacggtggccgtcctagctcagtggtagagcgcgtggcttttaaccacgtggtcgtgggttcgatccccacggacggcgttgatttcatttttgcattttcagtttcaaagctatataatcattgccacatcatatattttacccgtttccgtactgcatgctcaccaaatttgtgccgttgtattaagcttgctaaattggtgccgattggccgcacatcaaaagacaaccttttcattcacaagatagcatgatgatagaaggaaagaacatgtccttcaccagaaaaatatatcggatctcatcaggagtattttccaatttccagtagaactgcaggttggactgtgctgggcttatccgagacggactccattgaggtgaggcttcaggcccgatcgcgaacacatccaaagcccaactcggaatcctttgccctgaccggctggtataaaatgcgggagccactgccgcctgctccatcatcgggtcggctaggcttccgaaaatccccatcggaagcctcctctcccagcgaaagaaatcctcaaaatccccagtagagtcgtggtgattgatggctgataaggatgtggcggtgattgccggtaaggaggaggtgggtgatgaagcgacggcagcggcggcgttgattgccgacaaggaggaggtgggtgatgaagcgacggcgtcggcgactgtgaatggccctgacaagggtacccgtcgtaaagtgcgggtgatggtgagcgtagtgcacgaggtgaaggcggcggagaaggtcggcgaggggcatcctccggtgccacaaggcaagatccggctctcgcagcagaccatcgatgcgatcctcgccacgaagacgatgcattattctacagatgccctggaatactaccggatcaagaaagattatgagatgctccgtctcatgcacagctgcatgaggacgcatgacgagtttcagaaacgcatcgtcaagcgtaaggcatggatccgtaatgagctggagaagaaagggtacgttgatatcgacgagagtaacgctgcaaccttcactcctatacattggagggaggagcttgttgttaggttgtctattggatcacctaggtttagatctagtcgggtggttctatttgcgatggatgattgaacaacaatagagaataagggaaagggtttagggatgtgaccggttgacgcgttggatgaagaggaagtcccagccatcgtcgttgtcgtcgctctgcttgacgtgggcggcggcggcgatggcggtcgtgacggcgacggtgctgcgcggcagtggtggtcgtaggggatcccggcgaggtcgtggcgcggcggtggagtcttcccgtcactggctgcgccccctcgatcggttagggtttatggggtggagtggcggcggcggcgacgaacctcgttccttgtgtcgttatgccgtcccgtcctccacccctctttatatggcacagtgtgacgggggcccaccagccattgggctgggcgcccccgatcagggcgcgggtcaaggcccccttgagcccaacggctcaaggggagggagatccatctaacattctcccccttgatctcactatttcctttagctttttctattccatcacagatttacatatagagcatgtttcatcgtcacggttaattaccgatggattcgacagccactatacacatctctattcagaaacagatactttaacttttgggccctatagtccaggattcataaggcttcccttaaaacccatgcatgctacatgttccttgaacatgttgggaggtaggcctttcatgagcggatccgcgagcatcctttctgttcttatgtgctcgagactgattgtttgatcccggactttgtctttcacaacatagtactttatgtcaatgtgtttggcagcaccacttgactaattgttgtgagagtacattactgtggattctttatcgcagtataactttagtggtttctcaatactatcaaccacctttaaaaccgggtatgaacttcattagccagttcacctgccccgtagcctcatggcatgctataaactcggcatacatggtagaccctgcagtggtagtctgttttgagcttttccatgaaatagctcctgctgccagggtaaacatgtatcccgatgttaactttgtattatcttttgcaaagtcagaatccgaataccccactatctagagcgattctgcttttctgtaagacatcatgaggccttttgttccttgcaaacacgcaagactttctttaccaatttccagtgcactgggcctggattactttgaaatctgccaaataacccggtaacaaatgccaagtcaggtcgtgtgcacacttgcgcgtactgtaggcttcctacagctgacgcatatggctttgttttcattttattgagctcatactgatttctgggacattgcgatgccccatacttttcgcctttgactataggagcaggtgtaacactgcatctgtacatattgaatttcttcaacaccttttctatatatatgccttttgagaaaatcccaatgcatactttgttctatttcggtgaatctctatgcccaaaacatatgaagcctcaccgaggtctttcatgtcaaagtttgaggacaagaatttctttatttcctgcagtagattgacatcactactagccagtagaacgtcatctacatacagaattaggaaaatgagtctcccattcttaactttgaatcaatacagttgtcctctacattctcttgaaaacccaaatttctttattgttccatcaaacttcaagtagcattgtctcgaagcttcgctttaacccataaatggatctctttatacggcatcccatattttcgtttcctttcatgacaaaacctttcggttgcgccatgtatactttttcctccaaatctccatttagaaatgccgtttttacatccatctgatgtaattccaaatcataatgtgccactagtgccattataatcctgaaggaatctttacaagagactggagaaaatgtctcattgtaatcaatcccttctcgttgcatgaagccttttgccacgagtcgcactttaaacttttctatattccctctagagtcatatttggttttgtagacccatttacagcctactgttttggctcatttaggaatttcttctaaatcccagacatcatttaatttcattgatttcatttcatctttcatggcttctcatggcctcttcatatgagatgggatcatcctccatatgcgactctttcaggccttctaggggcctcctattctggcacattatctgtttgaggctgtttcatctcctcctctgatgtggcaataatttctgttgaatcctgtagaacaggttcctcactttcattcattgttgccacaggagagataacaacaggtgttggtaccgcaacggcatgcattgctggcacaacattagcaggtagagagaagaaaggttcctgagtcgacggagcgggtacagacacccgcctctcctcaagatcaatttctcgaattaccgagctccccctaatcatttcgtcttccaagaagacgacgtgtcccgtttctacaaactttgtataactgtttggacagtagaaacgatgaccctttgatcttttagaatagccaataaaatggcagcttactgttttgggttaaatactttatcctttgcaggactcccccacacacggaggatccatagctcatacggtgttttgggcaccgatgcattctatgcattgtatgcattgttctaaaactgagaactccaatggaggaagaactacattcttaaccagtctctcaattctccccctcgaaatatggcataaacaacagtgccataatttcgatgagacatcagaagttcgctttcttttcttttgtcaacgaggacacaacattcacattctcagaaagaaataaagctgatcttgcaacacaagaccaatacattcattattataccatagttcacatttgccatttccaaaatggcaatcatatctatcaaaatccaatttggatacacttattatcaagtttctttgcaaagaaggaacataaaaacgtctggaagtaaaagtgtgaagccattcgcgagttctaggcgaagatctccagcctcaacttttgcttcaactccattggcaactctaatggatctttcacttctttgcatagtcctcattgaacggaatccctttaaacaattacacacatgaatagttgctccagaatcaatccaccatgtggatctagaataaccaatcataatgagattctttacaaatgtaataatgttctcacctttctttgccatgatcactgtcaggaagtcaggatgatctttcttggaatgtcttttcttgcaatgtagacactgatcttgtctcaactgtaaactgttgcttctgaggcagatgctgaggctgtttttcttttgaggagggtgacctgtggctcttttccttgttatctttgacaaggttaatggagtcaccattggtctctttgtgtctttcctcctcttgcacacaattagagatgagctcttcaatattccaattctctgtacttattttgtagttgacaacaaggttgtcaaagttctttggcaatgaggacaaaaccagatggaccagaaagtcatctgagatgcccaaatctttttgcttcaatttggaagccatattgctcatcctaagaatgtggtcttttacaccacctccatggtacctctctgtaacaagctgctttatcagctgtgtcgcataaaactttgaagaaccactaaactggctctttatactttcgaggtacttagagacagtgtcatactctgggattgagcccaatatggttggctcaatcgtgttctttaccgcagccaaacaattcttgttggctgaagaccatttcgcatgctcaatgtcatacgacatgatgagggaagcattgtccctctctctcttttgccattcagcatctgactctttttcacctctgaaaatttcagcaggttctataggacatggggtagtcaacacccagtccacctctcccaagataaaagcaaggtcgagttctcttttccattcttcgtagttatctcctttcagggtcggaatatctttaatgtaacccatcaaggagtagccacctaagataatcatgtattgtgagaacaaaattaacattaaaattattatgtattaagtctacatcaccgttgggcagaaaatagacataacacataaagccataactataacattgcaattatcaacattggtcagaaaaattacaacatcatagcacataattaatgttcctaaaattaaaatctcctgttggttcgaaatttaattttagaaacactaattttcatcaatttcatctatttgcagcggaagatctatatacaattcatataaattgtaacaaaactctgttgtttacgctctgtaaaattctcccgttggttcaaatttaaacagagataaaacatgtaaaacaattcaaaattctattgtaatttgcatgaaaaatacaaaatacatgttcagaagcatttctcacatttatctattctctaaacaattttcacgttggttcaaattgcttagaaataaacacaatcattaaacatattgaaaatgcttccttcggccgagggacttttattaaacttcctttcttttgattcggccccgagggacctaaaatgaactttttcggcctttgccagtcggcccacggccgccttgcgcgcgggcgggcgccccctcccctttccccaggccgcaacctgggcctgggccgggaaagtggctcgccgtgcgctcccacatgggccgatttcggtccggccgccgtcggccgtccgatcgctagggtttcgatcggacggtcgcgcgggcggatcgggcaaacaaaaccgcccccgcccgccggcgccgaaaccctagctcctcttctcttctttctcttgcggttgcacggagcggcgtcgccgtcgccgaaaccctagcacagcgccggcggcggcatggcgacacggcggcgccgtcccactccccttcgctgatgcgcgcactcactcaagggtgagtgcgccgccgtcgagcggttgtgccgcggcgccctctcctttctcttgcgggcgtgcgccgtgccgagcggcgtcgccgacgccggcagccttcgcgccgccgcgccatggccgacgccctcgcgccgccacgccctctattcttttctcttctcccccccaccgtctcacccctccacgcgagtgaagagtgagagaccggcgacgacggagatggtggcgccgccgcgggccccctcgccggcgcgcgcgtgcacccgcgggtgcgcacgcggctgtcgagtggctcctcggcggtgcctctttgcccctctccccctccgtggccggcgtcaacgacggccggcgacgaggtaagattagggttagggtttcgatcttttcgatccgttggatcgtttgcttttctttgcctttcttttggatttctttccccaaccaatctaaactctagggtggctctgataccattgttaggttgtctattggatcacctaggtttagatctagtcgggtggttctatttgcgatggatgattgaacaacaatagagaataagggaaagggtttagggatgtgaccggttgacgcgttggatgaagaggaagtcccagccatcgtcgttgtcgtcgctctgcttgacgtgggcggcggcggcgatggcggtcgtgacggcgacggtgctgcgcggcagtggtggtcgtaggggatcccggcgaggtcgtggcgcggcggtggagtcttcccgtcactggctgcgccccctcgatcggttagggtttatggggtggagtggcggcggcggcgacgaacctcgttccttgtgtcgttatgccgtcccgtcctccacccctctttatatggcacagtgtgacgggggcccaccagccattgggctgggcgcccccgatcagggcgcgggtcaaggcccccttgagccgttgggctcaaggggagggagatccatctaacacttgtgacagaggaagaggagagtgacaatgatggggatgatgaggacgatttcagcgagggcgagaaggagtctgaggaggacgacgatgacaatggagacgacgaggaggaggtgtccaacgacgatactacggaggaggtgtccgacgaggaggaggtgtccaacgacgatactacggaggaggaggacgaccttgaagacgatgacaagtcctcttctgatgatgatgaggcaccaaatgaaagtagtactacttattagtattattagttagttactccatataatagtcactaagcatgtgtttggtttggagatgtggtgggataggttagatgatccattctattttttggatgggttggacctagtttctgtttggttggagggatggaatgaaccatgtatttttttttgtttggtttgagggtataatgggctagaatggttctatcctttgtttggatggagggttaaagatgtgaggttacctctcacatgaaattatttcttggatataactacaacattaacacattcacatcattatctctactactaaaaaagaccataatggtggtcgtgattcctacaacttttatttctgatacatctaatttgtctattctttacctactgtttagtaatagtgtatccaaaaaagtttttgtcttagtgaaaaattcatataacagaaaaagaaggtcctcaactcttccataatatccctatcttgcttaatatctgagtcatgcagagatcaattatatttgttcattgctcatgttgacttcaactcatgcaaggaatcacttctatatacatgatgctttgttgactgggactgactgacagtagagattacaatttcagaaacctagcaatcgaactaatattgaattctatagattttggtttttaggagttgggactttcaagttgatggttgtgagcagcggttttcatttgataattcaaacctctttcaaatctatacatgaatattttaaatgtatgaaacctccttagtaacctatgccttctactatatcgaacccctccgccggccaatagatgatgttgaaatagatggtgttgcatccccaatgtattgaattttccatttttcaacttgcaaacccacatgttttcaccggacgaattcttcttttgcatttttctgttcccagattgatgctttaaggatacagctccagttattcagattttgtgaacccacatgctataatctctaggtgaaaacctaaactcttgattgctatacctaactctaaaatcagacaacacctactatcttacacatgtcagttgttcacggttatttaatttaaggttacttacatgttctcttatggtctttagtattgtcatgcatattctgctgcagcagaacttttctcttaatagacatgtatatataaaatataggcatacatagggatgcaacatcatctattttaacactgaaagtttctgaaaaatataagataggtaagtctgaaaatttactgtcacaacatgggaataataggaagatctacggctctcaattgcctctgttctatacctctagatgattcatttctcagttagttttagatatcaccaccaaacctctatatgattcatttctcagttagttttatataccaccaccaaatttatatacacatggtatataatctgtgagatgacattttatatagtatagtctcaccatcaatttcttttgtagtggatctgaacatgtcaataaagggtatttataatgacttgtttgttttctgcattttagtttcaacttgtggttccagctgaagcaattggagatttattaaatctaaggctacatgctaggctgctatgaggtaatctgaggaattcaaatttatatatctggcagtacaatatcatgttcatactgctttgttctggaaaaatatctgacagtttagcacctcaagagatgacatttgtaatgtattactcctgcatttcctttttcctctagtcaggagtactcacatgagttctccccgtgctaacgctatgattaaatttgacaatacatttcaaaaatcaaaatgcatccgagttcaggaggattcacatgagttctgaatttctgttgtagtcactgaatttgtgttcaacccttgagaattgtcaaacatgctaggatcaagtatatatgtcagccattaggaaatgtgagtttctattttttgctaccagcagctccatgtgaattcaggtgcatgtagatgattttatttaagttttaaaacctactgatgcaagttttgtccatatttagtcaatatagtttagcacataactcggtctcggagttcacggtcgctccctcagcatccagagttcaatggcgacggtttctgctgcttctggtggtggtggcgctgctcatggtggcttctgctggtggcaaataattcaggggcggagctactatgtaatagggggtgcccaggaacccggtcaagaaaattttttagctatacctcacctattttcaccatgcatgcacccccctcaatacaaacttaggcacccgcatcagcttaaactcgatctaaagtagagtaaattaagcaaatggcaccaccctccatttcgctctagctctgccctggcgatggcggctgtgccggctctgatcttcgccatggacccgggttctctcccacacatcttccttatgacagccatggcctcacacgacgcgcagaaactgcctccgcctctcagtataggtagcctcacgttctcctttagagttacaccacaagttgaccgtacaccagttcaatggcatcatatgcaggtcttgactgcatgcacagccgttggctattgcatcgccaataagtactccctccgttaaaaaaaaaaaacccaagttaggatagaatgtgacatatcataggatatgatacgacgtgacctatcgtaggacaacgaatctagatatcctaggatagagtttttttttttttttttgaacggagggagtagtggtgtattggctcgtgatgaaggcttggtgttataaaatggtacttcctccatttcacaatgtaactttctagtattgcccacattcatatatatgctaatgaatatatatatatatatatatagtaatatctagatttattagcatctatatgaatgttagcagtgctagaaagtcttacattgtgaaacagagggagtattctttcctcatctgctcctccattgtgacgaacccgactaacccttctctgcttccctcctctgctactctactcctctgctgcttccttccgattctctaatttgtccttactcttgatgttgttcatcgattttgattgttgtagcttgaggttttgaggatgatgaaaggtatagtgcttcttccatgtcagtagggatagcagattgtgttgtttatgattttgtttttagtctgatctaatgtaattagagaacgcattttaggattttcaattcaaaaccagcaggcgttccttcttcttgattcaaaaggttttcagtgagaaaaaaaacccaagatatcattatgttgctatttagaaaaagccaataatttacgatctccgttctggtttatgttttgttagttaaaccctggcatcattagcccggagaaatacacgaggtgcttcagtctgaatgttttggttcaagatacatatttcttaatgagattttgttcggtacttttaaattacagaactgtccattttgtgttgtagttcatcatctttagaatatggactgatggcattgtcaaagcctcaagtggtaaggaaggaccagtggtattaaccttgagaattaagaaaataaatgtatgcaccactggtagatcgcttcagaaccaatgatattaacctggagtattaagagaattaatgcctgcaccactggtatatttatttatgtcatgcatgttccactgttgacggcaactattgaataaatatggtcaaatatctcatgaacccgccttctttttttcagaatcttttttttgtgaaaagttgaaaccagctcattatggtagtgcccgagttgtgaacttactggtgaaaacattcaaactgcatttggttgctgcagttaggatgtcatcggtattttcttttgaatctctctcgttgatttggtttcatttcatttaggtagatattgtgctaaatttattccaaatcaaaatcatcccttccccatcaggattgtcatgctatctgctctctccaaggtgagtattggaaaccttctcttgtgacaatttcattcagctgatgagttatcctttgatcgtggccattataaataaaatataaactgaattgcactatctatatgatataacttctacaattggatgagttcggatgcttgttattgcctgacataatgatagcatgaaatattaaatcggaatacaaacagtgagtataaaaacaagcagacttttgtataaatgggaccatttgtgttattagagtgaggtttacatttggtcaatattatattcccgtttatgctcatgaaattcatcttattgttgttcactgcagcacaatccaactatcgatgcaggtcaatatccacaaggtccttacatgcaagtaacatgcgctcacatccctgcaagtttattctgttcatttatagtcaaattatgtcataatcgagtccatatgcctatgagaaatatagtttccttactgaaattgatgactgattgtacagaacatgactcacattttgggatttgaacatatatttcctatattaagaaattgtgcattcttacttagggatttgatctgttggtttgtttaacattgcagtactcccttattgattccttcctcgcttatgaacaaaaaggactcagagctgatacattgagtgcggcaaaggtgagtcatgtgaggcaaatttggttgtctatgtgtctattcattttctaagtaagctgtaagtactgccagcattacgccgtggtggccaggtggggagcggtggccgggcaatgggagcgccggagggtggcgccggagccagagcggcaatgtttccggcgtcggcgtaggcccagatggttgtgctaagggagctggcggcggtgggtcgtcttcctcgttgccggtcaacaccctcacccttcctggagctcctccccttctctgtggggagtttctaagctggattgaggtggcagctcgtcagcgggggaagctcaggctgctgaagcaatgccatccaatcccggattctccttcggccagatctggcgaggaggccggcgggtggtggaacggagaggtcctgggccagctctcagggatggtggttcgatgaagccggccgacggaggggcgtcggtcgggtgtggcggaagccatgtgccgccgatgttcagatggtggattcggattgggtgatgtaccacggtggcagggggttccgagcgaaagcttagcccaattctttgggccaacagtgacttcgccttcggacgtagtaaccctcttgagggcactgttgaggtatccctcctccctcggcaaggagctctgggtgaaaaccttgtccagtctttggatagatgacgacggcgtcttttggcgtcgcgaccctcgtgagggcgtcattttagagtcttcgtgtcgtagtggtgtcgttagctcggtggcgatcggtctcgcatagcgatggccggttcggtgcttggcttccctctctgtagtgtgtgttcggacggttggcacatggttcggggcgtgtgctctggtgcacatccttcctcgacagccagctatcgatgtaaaatttttcttgtaactttttcttcctatcttaattacattgaatgacctccttcggtcattccggcaaactttgtagtcatgctacacatcatctgcactattgacctccttatactcatgcgacggatattttttcagatcaatgcagtacaatcctacttttgattagtgataaatagaagtttggttgttgaactgatcaatacaagatccttatttgtaagtatcatcttttgcacctaatatctgcttacaatgagctatgagataacaaaaggagtttatgaaattgaggtgctcttaatttattgcaaggtcagtttatcctttgtcaaatttatacatgttgagttttgtgtatttttactttgtttgattggatcctataatgctatactgaattttggtagttgctgctttccttcctaataatccatcaaaataaatttctgaattttaaatcagtggagacctgaaaaactgtggtcaaaagcatttctgaacaatgtgtcatgattatctagaatatggtggtcagaagcacttgtattatatataccatgcattatttaaaattggttcctctaggtgcttgttcaggtgtttgcatattgttttataatgccaactgaacctatctgaaatcgattcctctaggtgcttgtatgcccgtgcgttcattgcactcttgtgcagtttgctaccaaatcaatctcagatttttctagcaagcccggttaattaatttgtctatggtcaagtgtagctttaatttgtcagatatggtgacctttaatttggatttatttatgatatttcctcaacaacctctataaagtttatctactttctttttatctatgtgaaaagttaaacagatggttccttaatttgcagtgaatttggttccccatctctggtcctacggtccagagattgacatttctctgttttatgaggaattcagaaaatgtttttgctaaatgcataccagaacagtacgaccatataaagggggagctgtggtcggcctggtgagtgtggacctcacggctaggtgctatcgctatatctacaattgcacatacgtgtattatccagaattttttcttctccaaaaccaacacaatgcccttaaatgttagttctccagatccaacaaatttgtgctgctcttgtatagctggatttgggacttcatttgatttggggttgatatgtggttatgtttcttagatttgagtgggaatttttgttttggttcaatcagaggatggaggataatatgatgtacccaatcaaggaccaagaaaccatgctgtgagttggccaatctctgttctcctgcaattacatttccctttttgcagtagatcttgcttccaattgattttgcagggcagtaccaatggacatgaacaggcagcaggatacagtttgctccaaggaaattttgcagcaccaaaacagtactatactggctagcatctcttgtttatttgcattatgatattttttttatcctgtaggacagattgatctaggctacgatcgaatgccacaatatatgtcaggcatataacacaggggagtgcagaaatcctgctattttcactataattcttttgctattctttgtcttggcaatgtactggattgaaattgaagatgtttattggagcatatatattatttttgttcagggttacaggattgaaatttaagtatacaagattacaagattgaatataactaaaggattggagtgatcatctcaattttcattaaatcttatataaagaggtagaatttcttcttttttcagagaatttagggaaaataaggctcttgtcattttttattctattactgaacagaatggaaagacagggttggttattattcatctacgaatatccaaattttaactcctaatactccatagatagttcagattggatagcagcaataatcaattttagcgcgaattgtttgtaggggaagtctacctttttttttatgcattcgacacacgcaatttcttttcctgagagacggtctgcaatttgtctagaattaaagcgtgcaagacctgctgagctgtgtcaccattgcattgcatctgatctaagttggcgttcttggtttaaattgttgagcggtgtcaatgctaaacttttatgccagataagagttaaaataatcttttaccaactttttacgcatgggcacttcctggatgccctgatcttacgttcgtttagtgccttgaaggaaaactaaagcattgctaggcttactttgttgcgtgatgatggagatgtgtttatagcacggaaataataaaatcattttccatatgttctctattaaggaaatattaattctactatttatatattttgcctatattaatttaatttttttaaacaattttcatatagaaactttttgcaaataaaacacgcaatttagcagtttgaaaaacatgcacgtgacaaaagggggaaaaggggtgccgaacacacccttagtacagcctaattaggcccaacccagtttaggtgctgcgtggtttttgacgcatcttcgtagtttcttactatttcagatcagatcatccaaagcatcctctttcgtgcacaagttacctacacatatcaacttaactcactactcgaggcactaaaattatcggatataaacaacggtggatccatgcaacatcaaaagtcttgttaaaaatgactaaactcgagccatcaacacatttattgctctcccttatgttgcagacaggattacgtccgtcttaacacaatccggattatataccgtgcggcatgcatcttaatttgaggttcatcaggtctaccacaattaaatttactcccttttaaaccgagatgtcaccaaaaacacaaagcgctcaaatcttgtcatcaaatgattattattatgaccggaagggatacttatcagctctactactactactactactactacgggagtgtttatttcacgccaaaattaaaagtttggattaaattagaatgatgtgatggaaaagttggaagtttatatatgtagaaaagttttgatgtgatggaaaagttggaagtttaaagaaaaagtttagaactaaacaaggcctacctctactatttcacaggaagaaagtcgtttgaaacttttttgactgacaaggtgggaataaaaacaacaatgaccatttgcatcggcccacagagaaaccgaaaccgtcatcgagtcagtagtgctgacgagcaccaacacacacacagagaggcaggcaagcaggcgcaatagttgtcacaaggacaaaaccaccgcacgtcagagagcacatgccaaccagtcacaggccagctaaaaaagaaacagaaaatgaacgaatccagcacgcacaacttggcaccaaatcatggaatccaatacagccaatcgcaccaccaaacaacgatctgattgataccacccccatcatggacagacaaatcactccaaacctcctaacatctcacctaaaatgttaacaatcgtcgccatggctaaataataagtagaatttaccctaaccaagccagatgaaggaagaacaagggattagaaaagcttgtagggagaagaagcatccagtggatggattaggtaggtgagcacaagagccaccagcatcaggatgtatgcgatccccaggtcgatcgatgtgcctgcggaaagcaattacaggagcaaaatgcacatcagtgtcatggtaaatcaaaacagcatatggagaaagttatcgaatagatagcaaaccaacagcatgtggcaaattgcaactaggttcataacaaaaaaaaatagtgaagctatgttgataggaaatggcatatcacagttaccacgttgcttttttaattcaattcgtgcgaacagagagatataacaagcatatcatacaaggtgatcacaaagatagagaattgttggctgtgaggcctagaaaagtagaaaatggaactttaagtctcttgcatatactataaaatgtcacaggttgttcttgtttacagttttgttaccaagactcgtaataataaaccgaagttaaaacagattatatgtcaaggtcataactaaacaaagataagccatttgcggcgttcagtaatacaaatggcgcatccttgtaaagttgtaatacctgccacctccactaatcagttgttacagatggcacattttgatagaaattgtggtcattttcaggctacccaaactgtaacatcagtcagagacgtgtaaaggggcggcaaccaatatcaactgaaagctactccaggaacgggaaccaccaataatagtataaaatgacaggcaagtgtaagctgcctgcctccacttgcaacaaaaaggtaaactgtggatctatccagcacgcccaatagatcaactactcctggacatcatctagtaattggaaaacaaaacaaaaaaagatcgttctagtatacgtctcactacaacagagatatggtatttgcatcatatagcatttaattcgtgtaatgcgctgcagaaattgccaaatggaactgaaattgaaaggaaatttcaaggacgtcacaacagagatccgaatctgccgaagattttgaatgatttatagcactaaatatatgctcggtccaatactactatactagaattattaataacgtctaaaattagaaaaagagggatctaacgcaagctatagatgctggtgctgaaaaaaaaaaggttaatgcgtactacatttcaggcgcaggtcgaaaaaacaaaattaaatctactcttaacgagagggcattaaatttcccctttggtggatcgacgaacaactggggaacaaccagggaaccagtcagccgccgcacggtgccagagaaccagaatgcgctaggctacggagcagacgagaactccggcgcgcaatgcggcttcggagagggagagagagagagagagaggcgggcaacgatatcctcaccgtcgctgacgggcgcgggcgccggggcctgcgccgcggcgggcatgaagatgccgacgacgagcacggccaccaccgccaccaccccgagcggagccctcgcagccaccgccatttctctcggccgcgccggcgtcggaagaggagaagcgacgggcggccaccgaccaacgcctctctctttctccctcgctcgcctagggctccccgcgaccgcgactatatcccccctatatactgcaattattattattatattatattattattacatagccgatgacacgtgggcccggagctaacgtggagcccacctgcagcggcccacgggagatttttttcccctcccccttattaatcaatgcggccgcgcgcgcgtgacccgggccggagatcttggagtgaatgacaggtgggcccatgtggtcaagcacgtggtggtctcgtgggtgtggcgcgccatgtggaggggaggggtagtgcgggggcatgtggacggacgcgacgcgccaggctggtaaagcgtgaaacggccctggtttgttcttttttgcaccgggttctgtacccggtacgcacgctgacaggtggggtaggatggtacgtggggccctttggtcagtggtggttacttggggttgtgcctgcacccgacattttaccctttttttttgctgtgcggtgtcgcgtgcccacacgttgcgccgtccgtcgttgctacccactccgctggtccctgcagccaatggcaatgcgggcccactaactgctgcaccgagtagtatcatgtttggtgcaggccatgcgctgagattcgtgctctccacctccctctgtgctgggatgtaaggtgcgtcacactcacacggagggtatttttcgtcaattcaattttcgtgacacagggacaattggctccactccatccaaaggtaatccgtatcgagatgctaagtaggattggaatactaacaaattttagaaagtacttatttttatattatatatatatatatatatatatatatatatatatatatatatatatatatatatatatgtgtgtgtgtgtgtgtgttgtgtataaattatagtatatagtattgattttaaaaaaattaatcagttttatgtaaacttaagcatatttattcatattatttttaataatattttgtaggattataaagatcatagaaatcaatgtaatatctaagattccatagaaccgtatgaaaatactatgtaaactaatttaaatattagatgggatcggtatcgtttcaatttggtagaatcatagtgttgtaaaatattacaatacaaatggagatacagcctcttctatttaagcatctgttgttgagattataagcatataatgatttaatctattccataaatagatcatgacattacagatgaaaaatagcatgaacgcatcattagatctacacatgtaaactacacagtataacatgaacagatcaaactgcgcaacatattgaacacgtaccgaggtggcggaaagaccggctgctcggtcgaaacttttcgcaggcgtctacgaaggcacgcagcgcgcgagcgaagaggaagacgagccgtcgcggacgaacagggagcagtcgtgcaaagcgcttcccaaaaaccttattgttgccttctcccggtgcaggacgtcgaaggcagaggtttcggagacctgctctcccgatcgcaggtgcacgccagcgagcgggatggagtaacctacgagcgacggcgtagcacagagtaggaggcaaaccctagattgatttcgcgtgtgttgcgtgaaggcggcggctcggtttatatagagaagggtcgcttgatcagggcgcccgaacgatctccactgcgcgtaaccgaaccggataagtcgcgcgtaacttatccggactccacgccgtttgcacgcaccggatttttcgaaatgtttccaaaacaaaaacgaatccgaatttgcagcaaaacaaaactgcaaaaggagactgcatctgcgcaaggtgaggaaccaattttgacggaccattcgacgcgtacgtcgtgcacgagcgccgcctgccctgccaggccaggccaggcgagcgagcgcgcgcgtgtgttccccctcttctctccaccacacatgcttcaagtggctaggagggcatcctcccttttaaggaggtctccctttcctagaataagtaaggtggtactaaactccacatgcatgccatcccatgaggtgggcttttgtgattttccaaagaattaatcttcgagtgggctaaggcccattcattaattccaacaatcccccaccaaatctcaaaatcccactgagatttgccttttccaatgtactgtttatataccagcagttcgatggagaccgattaaggttgaacatccacctagaactccaagctacacttactcacaacttgaacaatagactaagccttgaattgcaagtcttgtgcaagcaagtttcactcagagtcttatctggtactagaccgtctgtagactacccctcgggtggagcgtataagtcatactcctaggtctttagtaagcttcctagaagattcacccaaaatctccatagactgcgaccaacaatcaagctcacaaaggtgagttctttcaagaatgctctgcaggacagcatcttcgccaattaaagccaacagaactcattaaggcatagtcaacctgccttgcagttcacgagagtacatgcatcttcacttagagagggtatagattggtactctcctctaatttacttatggtttgttcttcccagattccaattcacgggatctccgatcacatagactgggttaccaccatagtataactcacatgggtctcaaacccatctccttcgatgcattgtctatcacatttcgtgatagtcccttcgtgaagggatctgccaggtttctagctgtttggatgtaatccaacgttataactccagagtttcttaatttcctgacaaacttcaatcgtcttttcacatgtctagacgatttcatattatccttcgaactattcactttgacaattaccgtttgattgtcacagttcataaggatagccggcaccggtttttcaacaataggcagatccattaatagatcatgcagccattctgcctcaacagtagcagtatccagtgccgtcagctctgcttccatagttgacctcgtcaaaatggtctgtttgcaagatcttcatgaaacagcaccaccacccagtgtgaagacatatccactagtggctttgatctcatccacatcagagatccagttagaatcactataaccctccagtactgcaggatacccagtatagtgaagccccaattccacagtacctttcagatagcgcattactcgctcaagcgcgcgccagtgatcatctcccggattagaggtaaatcggctcaacttgctcacagcaaaggagatatcaggcctagttgcactagccaggtacatcaacgagccaatgatttgggagtattccagttgattcctagcaattctcttgttcttgcgaagcaacaagctaggatcataaggtgttggagaaggcttactatcaatgtagccaaagcgattcaagatcttctccacataatgggactgcaagagtgtaatcacattctcacctctaattagcttaatgtttaagataacatcagctactcccaaatccttcatatcaaaattttgagacaaaaatgatttaacctcatttatcacctcaaggtttgtcccaaatatcagtatgtcatcaacatacaagcataaaataactccctcacccccaccatggcgatagtacacacatttatctgcctcattgactgcgaagcctgcagatgtcaatgtcttgtcaaatttctcatgccattgcttaggagcttgtttcagaccatacaaagacttcaacaatttgcacaccttgccttcttgaccttcaactacaaacccatcaggctgatccatatagatctcctcatccagctctccattaagaaaagctgtcttaacgtccatttgatgaacgagaagaccatgtgaggctgctagggaaagtagcacacgaattgtggtcaatctagcaacaggtgagtaagtgtcaaagaaatcttcgccttctttctgagtgtagcccttagcgacaagccgagccttgtacttttcaatagtaccgtcaggtctaagcttcttcttgaacacccacttgcatcccacaggtttacacccatagggtcgctctgtcacctcccaagtcccgttagcgataatggaatccatttcactacggacagcctccttccagtagtttgcatcaggagatgcatatgcttctgaaattgacttaggagtgtcatccacgaggtacacagtgaaatcatcaccaaaggacttagccgtcctttgtctcttactccttcgaggagcttcactgtcatcctccttagtgacatgttcatgtgtatgttcagtttgttctggtggtgtgattgaaccgggaattatttcagatggttggctcgaactactatgtgtatccttcattgggaaaaagctttcaaagaaggtagcatcacgagactccataattgtaccaacatgcatgtcaggtacctcagatttgactattaaaaatctataggcaatgctgtgatgagcatatcccagaaagacacagtccacagtcttaggtcccagtttgcgcttcttcgttactggtacattgactttcgccaagcacccccatgtgcgcaaataagaaagtgatggttttctcccaatccatatctcatatggggtttcgtccttatttctgttaggaactctgtttaacacatgattcgagatcaacaatgcctcccctcaccacgccttaggtagtcccgcagtgtccaacatggcattcaccaagtcagtcagtgtgcggttcttcctttcagcaatcccattagactcgggagaatagggaggcgtcctctcatgtatgatgccatgttcttcacagaataagtcaaactcgtttgagaaaaactctccaccacgatcggacctaagtctttttatctttctgtcaagttgattttcaacttctgccttataaattttaaaatagtctagagcctcgtctttcgttttcaacaagtacacatagcaaaatctagtagcatcatcaatcaaagtcatgaaatatcgttttccaccctttgtcaacacccatttcatttcacaaagatctgaatgtaggagttctagtggtgccaagtttctttcctcggcagctttgtgaggcttgcgaggttgcttcgattgcacacaactatggcacttagaacctttgacaatggaaaacttaggaattaaacacatgctggaaagccgaaacatcaagccaaaattaatatgacataaacgtgagtgccaaacattagcctcatcatccacactgccacaaatatggttcacagacttattgcagaaatcagaaagggaaaagcggaacaggcctccgcactcataacctttaccaataaaatatccatgtttagacacgactactttattagactcaaaaactgtcacaccccgaagttttcctcccaagccaaaatcgtaatttacaaatgaccccaagaaaatgcaggtgaaatcaggagaaaaccctaagaaagtaatgcaaataataatcggacttgacatgtggaatttttcttgagttctacatgtcaaaattcattaacaggatttttagtggaattttcagagctctagaaataatttcaaccaattaaaattgagcaagcaatattttattccagagaaaatcctttttcctttttctttttctttttcctctctttttcctcctttttgtcaaatgggccgtcggcccatttctccttttcctccccctcctctctgttgggccggccgcaggccgaggcccagccggcagccaggccgccccgctgcctcctctctcggggtcgccgacaggtggggcccacctgtcggacccgtctccctcctcccgccgattccggcgcgccgccgcgcccgcaaccgtcgccgcgcccacgtctccgccttcctcgggccacgtcgaccacgcccgcgcgtgcgccgcgtctcccgcgcccattcccctctctctcccgctcgcgcccgcgcccgagatggccgggattcgaaaaccgaatcccgcctctctctcctccccactcccccgcgtcggccggcgattcccgccgctcccggccacgtccggttccctctccccctatttaagcatcgccggcaccccctctcgctttttccccatttcgccgacctctcccgagctccccatcgctcccgcgccgtgcaaccacccgccgccgccgtttttgctacttcggccgccactagccgccgctaggctcgccgccgtcttgcgccgtcgtcgccgttagcttcgcgcggccgaggtccacctcgtccacccctcctccgtcgaggttcgtcgccggagccctcatccccacgcgcacgggtgagcgccatctccaccgccgccttcggccatggtttccgatcgccggggtctatctccctctctctaatccctctcttctccttccttagggcacgccgaagctcgtccgccggtcgccgtcgcctcccgtggcctgccgtcgccgttcgccatcgtcttcctccgcgccggccaccctcggtgaggcatctcctctcctctccttccccgtttccccgtgcgtcgccgccacccgcgctcgccgtcgctttgggtcgttgccgccgtccgctgccgccgcttttgcgtcgcctccgccgccggttgccgtcgccggcaacccgttcgcgcgcgcgccgtcgccgtcgccgcggtcggtcggccggccttgagccggttcgcgccgggtgccgccgccccttctttcccctcccgtgccgctgaccggtgggcccgcgggccgacgcctcctctctcctccccgtgtcgctgaccggtgggccccgcatgtcggcgccgcgccacctgtgctgacgtcagccctggaatttattgcgcaataaagtatttaaggattatggttatagtaataaacacagtgaatcttctaaaattcataactaattcatccgagctccgtttaatcccattcaagtctcagtaaatcaagaaaaatgtgtagaatccattaaaaatggttttgttccctgtttcagtagtcttatagcctgtttgcaatgtttgctttgtatgtcgttagattccgatttctccgacgctccggtgtacttcgagatagtcgccgaggtccctccagcagcagagcaaggcaagtcatgcttgtcacttgatcatattgatcctatattgcaaatgtcctaatgttttctttcaaataccgcatttgttttgcaatattactatgggatggttacctattgttacagccatattattttgataccatgctcctttgttagcttggggttataacatgattagagtttggactaggaattgcttagccatgcttagttcaactagttcacaatggggaaaatcatattaatgtttagaccgctaattctaatggtaatgttggattagtaccaccgctctggtgttggttaattaaaatgaatcacatggtgggctgtgggtgcatggttttgctggtcgcactcatggcagttaaggaccggttcgcgggatgccctggaagaacttatcgtacttaccacaagccagcgtgggcaacggctgggcttgtagtgtagctttcctctagccgacgcatccaggcaagggtgggcgtgatggagtttggatgggccctgcgacggtctatgcggcttccggattcacctaggcacgagaggggactgcccgctgccttgcaaggagtgggggtgaaacctgaggtgtggtgtgcttggttagagggggttatgcgaatggtcctgtcacagcctctttccgggatgtcgtggtggcatgtcggcgcacggaaacgtgtcgtggggctgtgtcttgtgggtacagttgtacacctctgatcagagtaaagctattcgaatagccgcgcccgcggttatgggcggtcaaccagattcaccgtgattagtctcaccctagtgtaatctgttgaatttggatagtttaggtggatggttgggcctgtcgcaacgtgggttagcgttggacagcggatgtttaatactgcttaattattacaaccgttttcgtattcaattcctgtttataaatgccagtatttatgcaaatgaaccactctagctcttctttgttaattccctgcatcatacccctattccgggatgacttgctgagtacagtgggtagtactcagtcttgctctccttttcccaaccccagaggatgagtttatgtcagatgaaggtttccccgaggagtaggcttcgtccgtgccgtcgaggatgcctgtggagtggtgttcccgctgcagtttagtcaaggcttagctccagtttcttttgttttccgctgcatttttgtaagacttttatgatgtttgtaagacgtggatctgaatgtcaacattgtcgtttgtgtaccccggctggtcctggacggggattttaatgcacattctgcttggaattctattcgggaatttctgggcgtgacaaaaaccaacttaaatccgtctctagtcagacgggagccactaacaagattcctgtcgatagaagggacatgctgcacgttcttcagctgcacgatctttcccgaagtaaacttcagatctaccatgccaacaccatgaacagaagcatgtgacccattcctcattaggacggtggaaccccgtgcgacctaataagaagaaaacaatgagatatcagcacaaacatgtacattggccccagtatcaacccaccaattagtagactgattaactgaaaaaacagtaggtaaattaccatacccgcttccatctccagtgttgccaatggtcacattagcagacttagaaatctgccctgcaggtgccttcatccccttgcgctgtggacacttcctagccagatgaccaggttgaccacacacaaagcaagtcctctcatcctgattaggattattgttgttcttcttctgcttcttgaagttggtggtctgctgagctttgtatttccccttgctcttgttctgggccttgtgcacaacattggcactggactgcccaccatcgcccttagacgcagcatctttttcccgagctttctcctcaacatcaagagacgctatcaacccctcaacggagtattcctgtctcttgtgtttgagtgcagtaccgaaacttctccaagatggaggtagtttcgcaataatacacccgaccacaaatttgtcgggtaagacacacttaaggagttcgagttccttagccatggtttgtatatcatgagcctgttcgactatagaacggttgtcagccatcttgtagtcatgaaattgctccatgatatacagatcattgctagcatcagtagcaccgaatttagtattcagtgcatcccacaactccttagcgtcggtcatatgcatatacacctcgaccagatgatcgccaagaacgctaagaatgcatcccacaaagagagtagtggcttcctcgaattgcttctgctgttcagcagtaagaactccttcaggtttgccagtactcacccagaagcatttcatagctgtcagccacagagtgactctgatctgccatctcttaaaatgcaccggtgaatttatccggcctcagtgcatcggcaaaaccagccatagtaaaatcacagtgcctataataaggtttttggattgttgagattataggcatataatgatttaatatattccataaataaatcatgacattacagatgaaaactagcatgaacgcatcattagatctatatatgtaaactacacagtataacatgaacagatcaaacatgcgcaacatattgaacacgtaccgaggtggcggaaagaccggctactcggtcgaaacttttcgcaggtgtctacgaaggcacgcaacgcgcgagcgaagaggaagacgagccgtcgtggacgaacagggagcagtcgcgcaaagcgcttcccaaaaaccttattgccgccttctcccggtgcaggacatcgaaggcagaggttccggagacctgctctcccgatcgcaggtgcacaccggcgagcaggatggagtaacctacgagcgacggcgcagcacagagtaggaggcaaaccctagattgatttcgcgtgtgttgcgtgaaggcggcggctcggtttatatagaggcagcaaaacaaaacagccaggcgagcgagcgcgcgtgtgtgttccccctcttctctccaccacacatgcttcaagtggctaggagggcatcctcccttttaaggaggtctccctttcctagaataagcaaggtggtactaaactccacatgcatgccatcccatgaggtgggcttttgtgatttttcaaagaattaatctttgagtgggctaaggcccattcattaattccaacatctgtatcataaggcttactttgtgagttcgtgtacgcgtagttgtatgagtatgcactaatttggaaaagaactgaattgcgtagtagtagaagtgttggggcatgcactaatcgctaaggtttaaattatgttgctaattaatattacgtatacacaagtatgttttaaacaggtgttagtctggccagtgattacaaagcgggtgcgtcaattttgatcggatttcagcgagttcatggagtacacgtcgatgtgcattttaatacgagggaagggattcagcgatggcctccggacccacgcatcggtgtctgctactgcatcagcaatactacagacaatccccactgtgttacaaggtgtactcatgtatgtgcacatataattgaagttgcatttatcccctaatgtgttttggtgattaatgatgaataaggttaagggactaatgtgtttattgagactttaaggtaattagtcccatagttaacttaggtgatcaagagatgcttggagacccccaacaacactcattcaagcggatttgaagctcgaaggtcaataggatagtttaatttttaaaatcgagttttagtaaaaaccgtactattaagagggggttccaagtgttgttctgagatataaaaaagtgctcttagtgggttcctagtgataaaatatttttgagagccattttttcaaatgggtccagaccgaacagagaaggctggcaggaagttccggtccctggacccggaacttctggaccctgcattggctgaaattttcctaagtgttggccggaagttcctgaccctcggtcagggtcaggaacttccggacttcttccagttcaaaattgtgagtaacggctagatgacatcacctagccgttatatatatccaaatcacacccagcacaccttttggccatttcacttcagttcttccacaccctaggttgttctagcctctcccaagatccctttgcttcctccactcaaatctagagtctttcttgtgagattgtgagaatagatgagagtgtaggagtgatttggagaagctttgaatactggtgtggttgagtactttggatatcttgtgggctgtcacttgaggcttattactcgtggagatcatctcatagacggttaggtgtcgcccgcgagctttcaaagatcttgtggatgtctcgggaaagtttgtgaaggttttcctcacctccacaaggaaacgaggtaagtgagtaaagattcttgtgctgagatttcagaggttctcctcggtagagcaacttgcacttgtggtcttttctagaaggatttgtgagttggatctggtggtcactcaaattctagaaaatgacctaggagtgttgagttgaagaccttggacttcttctgagttctttgcataggtgaggcaaggggttaatcgagacccggctctttggagcacctcaacggagagtaggatcgaaagatccgaacttcgggaaaaaatcgcctttgtcttctctgtgatgattctgtgcatgttgttgtgaatgtgtatctactctgtcctcctatagttcatttcgtgcaatttaatttaagtgtccgctagttttacagtttttctgttgctcggaagttccggtatttagaacaccggaagttccggacagtctgagcagaccagaagtttcggtgttctacacccggaagttccggtcctgctgaatttttccgccgcgatttgtttgtgaatttcagtaaagtctattcaccccccccccttctagactatatctttgcgcgttcaataatatatgcgcatagttatgtatgtgtatgtgattttttatatgtatttgaaaaaaatatttactccctccgttttaggttacaagacattttaactttggtcaaagtcaaactactctatgttggactaattttataggaaaaaggtagtactagtatttttaatccaagacaaatatattataaaaaattgtttaattttagatttaatgaaactatgctagtgttgtaaatattactattttttatataattagttaaacttagagtagtttgacttagagtagtttgacttttacctaagtaaaaacgtcttataacaatggcttctacattcttttcctctattttcttttctcttctcgaaaggtaagcgaaatccaattgacgataacccttatagttgacactcgctcacaactattatctcttactcaaacatggtacacataaatatttccgatcatcatctaaatatgtcatatcatcgttcaatagcaattattattctatagcgatttaaatctcatcttactcaaacatggtacacataaatatttccaatcatcatcctcacgtaatttttataatattttaacatatatttatctataatttctataatatttaatacaaatttatccatacatactgtgaagcacggggtatcacttagtaggagtatttcttactactactgtagtatcaataaagaatatactgtagtggttaccgtgaaatgactcgccgaagggccaaaactactgtagagcactgaagctaactaagtacaggcccatcaaatttgcagggccagcatgcacaaagccacaagacactgggccaggttaccacatgggctgccgccacatatcattcgtcaatagtcaaacacatgcgccacatatcattcgtcaagaattctaaaaaggaaaatgtggagagtattttagtcattgaaaaaggaggttggctaaggctaacagagagaggaaaataagttaagcgtttgtagaatcaactttcatattggaattttgcagaacttgtgctctgctgagaaaatataatgagattaatttctctttagcatttcaaagttttgtcaaagtgaataccatattcaacatggttcacaaaaccaacaattataattgaaaacaatggtaattagttgaatcgctcccacattgagaagccactcgataaactggtcaagttttttttaaaaaatcaaacaaagattattttattcgataaattcagtcggttactgcgaaaacagaagaaaccccttgggagcggtattcgatcggcaaacgatttttgaaaccttggcattcaaacagctccctaaccttgtcacactcctttgctatatatgcatctgaatctagaacgggaacagaggatggtgcactacacaatcattgtaaagctgtgatgaacaggcaggcgcaccgcacagtgcagtgcagggcaattttggtggtcgagcgaccgaagcgagggagacagatgcgttggaggccactgttgggatttgggtatgatgcaaataattaattataatgatggacagttgatcaggagagagagagagagagagagagagatgcagagactgtcattatcctcttcactccaagtgctctcatcacatctcgattgatcgagtttctggtgataagaaagaaccatatgttatgtttactgaccacgacctcgcgagtcaagtcattaagtggtttgtagatttctctataaaaaaacaggaaatggagcgcggagggaccgtcagacggctagccccctccgccaacttttttcatttacggttatccaattaatcaagtaattaagttaagaaataatacctttatcttaaaatatagtaatttttatgttatgtatctaaaaatgttcacaagttattatattttgtgacggaaagaatagtctttatttagactctttccctatatatctaaatccttgctttgacattgatagtaatcccaaggtttaatttgaaatgcaataaaagttttatttagacaaattcgatccatcattttttcaatatcactcgcattcactttcaaaattgagaaatatttgttcacacttaaaaaggatatcaaagtgtcgggtgcatccaattatactactatattagagaaagtaatttgtaactacaagatttatgaaccaggtccgtaacgataatgacacggataagacgatggtaccacttgtgaattacggcgctggccgcctccacacaaaaaggccggccaaccttgtgttattcgtgacatgacattgcacaaattattgggagtaggaggaacaggaagccgcatgatagaacgagctattgagcacttaatttgtgcctcaaataatataccaagagggcaggcacatcacctttctaattaatccctttggtaacaacagggggttgtaggtttgatgggatgtgcatgcagaatccaacaaccttccaacatgcattgcacccaacaaccttcgaacatgcattgcacccccggttgaatttgatgctcatggcaggcatcaacctcacatgcataaatatgaataggaaagtacgggacaaagcacctgtcagtcataccacatggaaactatagtttggtgtgtgtcggttaatgatgatcctaggtttgaacctagaaccaagcctgttttcgtagagatttcttagcaccttaatttaaatatttaaatttcttatactcgtaaacttaaataatttaaagattattagctcctcggctcctcctagctactccctccgtttcaggttataagacgttttgaatttggtcaaagtcaaactactttaattttgactaagtttatagaaacaataatagcattttcaacccaagacaaatttattatgaaaatatattcaattattgatttaatgaaactaatttggtattataaatattattatatttgtctataaacttagttaaacttgaagtagtttaactttgatcaaagtcaaaacgtcttataacctaaaacagagggagtattatctttctcggtaaaaaaaaaaagtctgaccataccactacagaaattctagtttaccatttaaattttaataataagaaggaacacttagagcaagtactactagatcagatttttgtgctacctctaaaaatgccacctctagaaatgccataaagaattatgtgataagatggagaagagaagtgagaagagagggtgagacaccactcatgcacagagcaacctttatacaaacaccaaaaataaagtgagataatgtgagagtgaaccaataaaaattattggagtttgtgtgtagaaggtaaattgttttacatgttgcctcttaatcagtgagtggatgatgcaactaaaactggagatatagttgccatctccactataaaacttgctcttataatgatatatgatagaaaacaactttgagtttatccctattatgtgtttctcaagggattctttgtacttttctcttaatttagaagcccataaaaaaatgagtgagtgattgagtagtgtggacatttaaatttccgcctaggatcggttctccgattaagagcattattgtaatttttaagcttgagtgtggaagcttcgtctaactctattggtaagtagaagtactaaggatttccttacgtccatatataaatattcaccaccttcttagcttcaatattaaataggactagcaacgtgtatgcgcgtcgcaacgggaataaaacataggaaattgaggtgagagaacgtgatcggccgatgatcaagtaagatgactacgtaaaagcagtggcgaatctatgtataaattgtgggatccgctgacccacagcattttaaacaatacccctgtagaccttgatttttcatgtatatatctagaaaaattaaagaaatgacctcgcttaaatacaaaccagtgctagtaactaacccgacaggattaaattcctgactccgccactgcgtagaaggattaaggggtggtcattcaacaataaaaaaaggtaacattatggagaggcgagaggaaatgagattttaaaaaagctatactccctccgtccctaaatgtttgacgtcgttgacttttttaaacatgtttgaccgttcgtcttattcaaaaaatttaagtaattattaattttttccttatcatttgatttattgttaaatatacttttatgtatacatatagttttatgtatttcacaaaagtttttgaataagacgaacggtcaaacatgtttaaaaaagtcaacggcgtcaaacaattagggacggagtgagtagtatttgtatggatttggaagagaatttgtatgcaagtcaactaccctaatacggattattcgagcacttttttcaaaaaaagaaaaagaaaaacaagatactaccagtattattatgcgtattaaacgtacagtttggatttcatatcggactaaacggtcggtctcgatgaacccgggcactgccaacatgccagaaagcgaatctactgcacgtggcagatggagatccgtacatcggttgatctgagccgtacggtggatcgtgatggtgcgcctgcggacgcctcggatcagtaggagcatttgtcagcggcagagcgatgcacgacaactgacggttgccacttgccggcttgctgccgttgattcatgatggatccgtcaacgttgacctgagatatactccctccgtttctaaatatttgatatcgttgattttttagcacatgtttgaccgttcgtcttattcaaaaacctttgtgaaatatgtaaaactacatgtatacatataagtatatttaacaatgaatcaaacgataagaaaagaattaataattacttaaattttttaaataagacgaacggtcaaacatattaaaaaaagttaacggcgttacatatttagaaatggaggaagtatgtataatttttgaactgtaaataagacaacatgatgaaagtcagatggtggaaaaatgcgattttaatcacgtcaaaatgtttaagatggcggtggcggaccgatgtttcttttttttcccattatacacggacaacagtatacttcctccgtttcacaatgtaagtcattctagcatttcctatgttcattaacatcaatatgaatatggaaaatattagaataacttacattatgaaacggatggagtacatacaaatcagtatgggctcggggctcctctaaaacagaggattcgaaaaatacaccaataaagaaaacacatgaatacaataccatgttgtgttaaatcttgtagaaaattgaaccatgggaatttgcaacgaataccatttaacagcaccagaaaaaaacattgaaacttcaagactcaagggagagaaaacataaggctatatcttttgttagtttacctcacaattcttatgaaaatgggtcatcctacaggaaattcaaaggattttgttgaggctaatcctttgttccaaagtaggctaatcctttatatcacctttatatttttcaaatttatcatttttctcaaatatatatataaacataatattaaactattcattttgtttcaaaatagaccaacttaagatacgatgtgacatacctagtacaataaatttggacatgcccctatttatactaagtaatgtcatatccctatcctagacacatttaattttggacggaggaagtaactaataaaaataattaaatgcaaataattggaatgtagctaaatgactaaatactggttaagaagcactgaatacatggatatatggtgatctctctttgtattaacgagcagctcgtgagttggcttggctttacgctcatgagctaaaagcccagtctgcagggtgactggctcgacgcattaaaactacaagttcaagccaatccaagccattcgagttttgagttttttccccacccctattctaaagggcctagtaggtttttcatagtatcacaataccgtaaatttccttcattttttcttcaataccctatttctaatggcctagatttcttttttcctacatatgtacctcccgctcaaatagatgaagactaccgataaatctctggtccctctatatttttaatgaaaatattctaatatccgtgagtatcaggctttgtaacctaatactccgtggatcaagtcatatacacccaactcttccagtacactacggtgctttctcgataataagccaatggttaatagcgtacccacaaacactttatagtgtcacataataacattgtcttggccacggttgcgccaacatgccttgatcgcaaccgaccagtacatataattcttcaacagttcaacagtaatcgtgttcagttagtaagaaatacgaagcccccacgtgagagaaaaatactattcaggatgccactaaagcgacccattttttttctaatataacggcgatgtacactgtgctctacagtagttttggcataatattctttctgataatctaatcttcttggattagctgcagtaccggtgtacggacacaaaggataatttctcgtacggtatcgtaagcgcttacgtatgatgctatctaatctcttggctacttgcgctttttgatccgtactatacctttgaaaaaactgcaaatttgtcctttgcatgggtgtacctcaaaggcagtaggcagaaaaataactgaaacagtcatatgcaaccccatcgtctggtggaataaaacaaacggcatatttgcaaacaaaaagtgattttgaataaaacttttatatacgggttgttagtgatccaaaagcaaaggctgaaaaataaacttcgataaaaaaaaatccaaaaccagcttcaaatttaatgttgaaaaatcaaattttggttgataagtactccctccttccaaaagtctaagttctagtatttcttttttaccaaaaccaaggtgtagttaactcattcatcatgtgacaaaaccaacgaacatgcaactaataagtactaaaatgatttcttgggatccgatcaaaaatttaatataacacataataattacaaatatgacttagacttttagaaaaatcaaagaataaaataagactttaactattcatcaaatagttaaatatctctttggaatgagggagtataagaataagcgaaaagatgaggtctatagtatataaatttattaaaccaataaataaaatgttccctcaaaaaaacaaataaataaaatcagagaggcactgtttagaaacaataaaaatactagggaaaatgatatttgcagccccaatgttgtgaagtaccggatttactgtgtgataaaagaatctgtaataaatctgcagctgcaaatatctttttcctgaacaagtaaaagctttacacgttattatattagcaggggatccagccgtaaacataacaaggaattcttaatttgggaataatctcgaagagaagttctttccgatcagaagaattgggcaagtaaacatatagggaaatgcacatatatctaaacctaataattccactgcaaatttgttcaaggtgctatattcctccaaaattaagtggaatattagcatgaacatatctatttaaaaatatagaattccattcctgcatatcattcaaaaggtcgatgaatagacactgaatattccacatttccactgaaagaaacaaggcttcaggatttggggatatcatgccattctattgaaaattcccagtagcaataatgtataatatattcttgacgcgtcacgtatctttgtgagctattagggaaccagtgagaacgtttcttgacctaactaacatcaggtaccaaaaggtacatcctgtttgtttttttttcctttactgtcattattccttcattcgcagttaactagaatggattgcaatgtttgcttggattacatgcatgagtcgttctatagaaaaactttaggaattcttttttttttaaaaaaaatatgcatgggaccaatggtggttgttgaacattagcaagccggagtttttttttccctgaatagcagaatgatttgtgataattatttgagggtttaatttagtcttgtgatcatgcattgatcaagcaacatgtatatatgtgcacacctcgcccatatatttggttctgcactctattgacaattaaatcaaactaggccattgtaattgactaattacgcgtatatataagtcaatagtgtgcactgtgctgccttctttagcgtataagaaaaggcatgcatgcatgggactatatacgggagcatatatgcatgattttgagtttttgcttgcaacgtttaaccactcgtcttattaaaaaaaattaaatataaaaaacgaaaagttgtgtttaaagtactatacataataaagtaagtcacaaataaaataaataataatttcaaaaaaatttgaataagacgagtggtcaaacgttgcaagtaaaatctcagaatcccttatattatggaacggaagaagtagatgaaagcgttgacctcaccacttgcacataaatttacgacttcttaatgtcttgcattgacaaactaccgggctcaattcaagatgtacatgagaatccccaggacagaaattcattgcaaattaagcaaagactggtcaagcttattgatttgagaaatacgactaaccaggcttcgcatttcaaggtcttgtttccaaaagggcgaatggtcaatctgataattcaagtttcaccaaagattttttttttcttttttgttgaaagatcgaagtttcaccagactgagattaatcagtatagtaacaagattacgctgtttgcagcaaagattgatcgactacagccatgaattgctattgaataaaggaaattatgatgaatcaacaatgatctattaattaatagaactaacaatcctttcatcaggagctgaggaccatccctagcgaacaatatccctaaaagcaggtacaatagcaggctataagccagctgcaaacatattttaaaaagataaatcaggagagagaagagcagcggactacatattcgtagccagctatagcacggactccaagacgcagtgtgtctatgacaggtggggctaggtattaatagtatagtatgtaactattatatgaataagctattaaattggctataaatcagttggctatactattaaacttgctctaacaaaaactaccaacaacaacaacagctgccaataatggaagccaggaggagaaaaagccgtacacgtggtgcacaccccccaacgtcagcatgacgcgcaccctccccagcacgatgtccccacatgtcagcgaagtgtccagccagaccacggacgcgtgtggaccccacatgcagccaccgctacacgagaaaattgacatttagccattctcgggttggggtttcgtcagaatgccatcgccaaatgtggcttcgttataatgccatcttcaaacgaccccatcttgccacactgccatttcaaccaatttttattatttgcaaatgttttctactgttttgcttatttggtttgacccaaatgcccttgcctcagccgtggggcttgccaggagcgtctttcacctccgtccgccaccatcattctctctccgatgaactcatgtcccaaattgatctcactccttggttgctctcgcccaaaattgaatgcaaaaattggttcctctcgtcctcctcattaattcccccaacaaatcccactcaaatcggcttaactccgtggtggattttgaagtccctcttcaatagcgagctccaccatggccggcgtcgatctctctccccggcgaggttggagggcccactcaagctgctggacgccgcggggttgagctggctgcggctgcgcgcgtgagcaggtcgcctcgacaaggagctccgctgcgagcaggtcgctgcccatgtcgaggagcacatcggagaagggggtgacgccgtggcacgcgttcaagtcgagcgcttggtgcgccgcgccgccgagccgaaccatcgtccccgtccgtgccggcgctttccccatccccaggcgcgccgccttccccgttcctggtcgccatcgccaccgccggcaacctgtgcgtgaacccggtgagcttcgccgtcgagctagtgagggcggcgaagggtggcgtcggcgccatccccggtgtggccagctttctcatcccgtagcggttcagcgacggtcccgagctgcgccggcgccgccccaccatctgcaacgaagagatgaggtaggagaagagagatgagataggatccaagggtattttggtcatctcagtaagaaaaaaatcattaaactaagaagaaatggatgaaatggcattgcagcatgttgcccctgactaaggatggcattttaacgaaaccacttttgagagtgtcattttagcgaaactccgttttgacaatggcaaaatgtcaattttctcccgctacaccggcgtgccagcctggcaggtgggccccacacaacccagcggaattgaacgagtcaaagggtgcgactttccgcaggtccacgtccgctcacctaccacacccagagtcagccacaccacccactgacacgtgggcccaagggtacagaccccacgtgtctgcctccgtacgcaaaaacgccaccggtatcggtatcggcggcccgatttccacgcggctttgagattcgtgcgggctcccccggtaagccgttccgacctccgttaaagctgaccggtcaacgtcaaatacggattgggggagcacaacgtgcaacgggtttgaccttgcaggaggtgaagaacagtgtcgagtccgtgtctggctgttgaaattccgttcaacttgtgataactgataacgtgtcaggttcatttagtagtattttttttctatgcgtttatttattatcgatctttggggtcctaattaatgaagcccatcgatcgccgacatgccatcacgaatttaaatttaagcttgctgatggaattacgaatttataattcgaaattattggacacatggcctgccccccatggcccattgtgtttagaaaaacattgacgacgtgcatggggtgtgtgattaaattaaacgtgcaccgattgccctgtttcgtgtggtttcgccgtttgcattatctattatatactaaaagtccattaaactttatataaacgcttttaaatcgtcacgtgtcacttctacaaacgtttttaagccaccacgtggcaatgtataatcacaccgtcgattttcacttaaatcggtgacccaataatttggaccattagattaaatgtattattatatatttaaaaagaaacaaataccttactgttcaccaaaaaagaaaacaaaagcacatgtactccatatatccatatataggtacgtacgtagtacctaaagactaaaaaacaatcaataatcttacctactgttcatcgtaagaaaaaaaaagagtaaatttcacaaaactacagatactttgaccaaattatcacaaaactacatatttaaggccgtatatcatagaactacagatttagtaacaattttatcacaaaactataggtttaagacgaagtatcacaaaactacatattttagaataaaattatcacaaaactacatattttaggatttaaatcctttgcactaatgttatgtttgagttataaatatctaagtttggtgattaaattgacattaaacctgtatgtttgtgataacagtattactaaatctgtagttttgcgatattttaccttaaatctatagttttgtgataaaattagtgttaaatctgtagttttccgatattgtggtcaaagtatatgtagttttgtgaaatttactttaaaaaaaactacacacagagacttactataaaaaaaacaataaagccaaaaaaagtacgtacgtactaccatgaaaaaatcgattatttttaaaatagatatttttctacttaaagataaaacctattactctataaatttaagcaaatatcactgtcgattttgacttaaattggtgaatctaatattttaaaccattagattagatgtattttattttaaaaactaataccttactgttcaccagaaaaagaaaaaaaacaaaagtatatactccatataggtacgtacatacgtaatactaaaaacaatcaatcttacctactgtttataaataaaaaactatgcacagacttactatagaaaacaataaagctaaaaaaatatacatacatagtaccattaaaaaatcaattatctttaaaaatggagttttctactatttaaatataaaatctattactctataaatttaagcaaatatcaccgtcgattttcacttaaattggtgaacccaatattttagaccactagattagatgtattttattttaaaaacaccctattactctatatacgtatacgggaaatataagtacttcctacgtttcacaatataagactttctagcattgtccatattcatttagatgttaatgaatgtagacatatatatgcgtttagatttattaatatatgagcaatgctagaaagtcttacattgtgaaacggagggagtagtcagtacgtgcatatgacctgggaaaagaaatgaagtttacctactgggaaccaagaaaaatattatttacagtggttttctgaaatagtattttcaaaatcacggaaaaaaatgtgtatcattggaaaaaagatcgatggtcttttgaaatagtattatctactatttgaagataaatatattgctctacaaatttatgtaaatatacgtggttaaactaaatttatattataaatatgaaatatcccatcaatgatctttattcattctatcttaacatacaagactaatatatataataattaatgctatggtatttttttatttcatatcatattttagggtgtcaaatatcacttgacgaatatacaacactaatttaaatctatatttgtaaaaatgaaaacaacacaatttagttgtttcatttttcacaattagattagatttattattgacaaataatacaattctcctatatacggatacatgaaaattatataactgttgaccagaaaagtactccgtacgtacagataattgaaaaaaaaacaataatgcttacatatcatctgacggaaggacaaaaaaaagtacttatgataaagtaaaacaatcggaagtctttaaaaaaagatttttctacaatttaaggataatacctaaaaaacaatttaaggataaaatataataatattcaaatttacacaaatgtaaatataaatatcctattttaagcgttctatcttttaaattattttaaaattatatatccaatttgtgattcagttgtattcctttaaataaataaactattaatatctataaccctaaatacatcacaaatatggagtcgacatgtaataattaatgttatgataataatttcacatcacattttagtgtaagaaaccacttgacgaatatataacgctaatttaagtatatatatgtattaaccaaattactaaaggtgtctcatgtgattagaacaataggtgttataaacaaaacagacactgaactaacatgcactaccctatagatatttgtcaaagtatgataccgtactttggattatcgtgatagtatttaaaaaaaatcactttctcttagttacatataaattcttctattattttgggataaaagttaactccttcgatttacgtgacggtggtaatataagtaatataagtttatgtttgattagatgaagtagtattattagctatatttttaatagaaaatatctttcattaatatatagtaaaattaaaatgttacttaaagtcatctataacatacacaataaaaaatgttatataaagttgggaaactccaaaaatttaaaaggaagaatcacacataatacaaatagatatgaactaactccattattgtgacatttttttaataaatttgaggatatacattttcaagtaatacgcccaaaccagttattgaacatacgtttaaaatagagtcaaaaaaatatttcaaaaatatgatccacacgtaaacattcgtaataaaagtgcaaacaagattaaacaacacgcctgcgcgtatgcgcgggctaccttcctagttttaattaaactctataataaatgggacatgactagtttaactatgttaatgtgttgatggtgtatgtatattggttaattaatattatgaactggagcactgatttgcaaaacaatctcatgtggcatgtcccatttttagataacgtgcttctagtacattcgccgactgtgaaggtgtgtacacccaaatcaaattttctaattaatgtagcatggaaggtgtagtgtcctgttagacccctcttgtctagctcattccatttgccaatgcattttaccagaaattgagaatatcatgggcatgttttgtgaaccaaacagtagttattattgatcagatcataactaaggagaaaaaatagctagccaatcaaatagccaatatatccagcatttgcatgtattataacaatttttaggtaaggtgtgtatagacagtctatttttgtatatacaatacgacatgaaccaaataaaaattagttgcaaaaaactgaccgacatcaatgtgttctcgtcagcaaacaagcgcacccctccttttcaatcaaatagtaccatttttgttaacttacattattattagtcctgatactaatatgtaattctttttccggggacatccttcgagatgggttacctttagagtcaagtccaacccattcgagtcgggccttataaaattctagtgcgggttcatttgcgcatagatgtaaatctacatatatctcacatagattgtatttagttagtagaacacattttttattcagcctaggtagctcgtataaaaaatccagcctagctaattaatagagcaaaacaaaacagatttggagaatcagaatttactcagctggcaataactagcaaggcagctcgagtttattcctaatattgactccacacgctctcacggtgtatcggaacaaaatccaaaataagccataggtacatagaaatgcaccttcaacaaaaaaaaaagaagaagcaactactcccatgctttagaagccaggaatcatttgagctttaattctagtgtgcatataaaatccagttttgcatatgtgaaaagcgacaaaaaataccatacaagtgtgcttttctttatgtgcctatttgtacctcagaacaaaacacattcccaaatatactgatcacctcccattttcttaaatccaatacaggaggtatacattttctccaagaaaagtccaaaaaaaatcacagtgagcttttcccattatacccctcccacccatggagtatcccctttctcacccctttgacatgctgcagagtcaagtggggggtgtgctgcccccacacccctataaaaccagcctccctccaagaagaaaaagaaaaaaaaacccaagaaaatagaccagtagccctcactcctttttagggcaggatccaatgccatcaccaccattcctcctctctctctctctctccttttaccctttcccatagtctccttctctcttccaaatcaatcaataaactagcaaaagtcagcgcctccctcttatctcctctctagagcccaagaaaccaccaccaccacctcctcctcttgaggattttcttgatttcttctcgacggccatggaggaggagctctgcggcaacaactgggacctcgacgccgtcgtccgcctcggctgctgccgacggaggatctctccggcggcggtggcgcagcaggtggatccgttcgcgtcgttcttgcagcagggggtggcgatggaggttgcggcggagaaggaggtcggggtggaggctgcgtggagcttcccggagctgacggtcagggacggcggcggcggcgggctcggccgcgacgccgacgagctcctcaaggcgttctgcgccgcctttccttcttcttcctcgtcgaagtcgtcgcctctgccgacgcctcctcctcctcctccgacgcagccgcagccagagcagcagaaaccggtgacggtgcaggagaatctaccggctccgacgacggctccggcgagggcgtcgcagccggcggcggcgaggcaggtgccagctggcggcgtgcctagatccaagaggaggtgagcgagcttctctttttcacctcgccagaaatggcagcagctgaactcctcatctccttcctaatcaatccgacaaaaaagattaattctattaattccgagttgctaaactctgctctcgttgctccaggaagaaccagcagaagaaggtggtgcggcacgtgccggcggacggcgtgtcggccgacgtgtgggcgtggcggaagtacggacagaagcccatcaagggctcaccctacccaaggtcagtcccctctttctctctctcgccggcgccgccgtgaaatggaaggaaaagctcaccggagctatggttttgttgcaacagggggtactaccggtgcagtagctcgaaggggtgcccggcgaggaagcaggtggagaggagccgctccgaccccaacaccttcatcctcacctacaccggcgagcacaaccactcggcgcccacccaccgcaactcgctcgccggcaccacccgcaacaagctcccttcctcctccgccgcctccgccgcctccgcgcagccccagccgccgccgccgtcggtggtggtggtcggcgccgggggtggtggagccgaggcggcggggctctccccgaccacaccgctgcggacgccgtccatggaggaggacgaggaggaggaggaggaggaagagctgctcgtggaggacatggagatggccggcgaggacgagctcctcttcctcaacggcggcgacgacaacgccgcattggatggcacccccatgtcctccctcttcgacatcgccgacgagcccttcttgccctcgccatggacggagcccaccgccgccggcagctagctcgcacagatcgccgcgccgttcttagctttttttagctcatcagctcgcaagaaaaaggaaagggaaaggaagagggaggaagagattagagcatccaattaatccgccattaatcatcgtcatcatcaccatcagcagcagcatactaaaaattagttgtttagcaatggtagcagtaggagagcatcaaatccttccagttcttggctgatcaaaacaaccctttttttctctctctttttatatttcctaggcaagcttgagagagactttgcatctcttcttttctttcttttttttttcttttcttcaccttaggtgtctggttttttttttttacatttgtaaatagaaagtggtagatgatgaaccaacaaaaggagatgaaacaaaaggggaaaaaaagatgatggtgtgtatcatgtagtactatctctctgcatggatgcagcaggggtgctttgctcttcttggctcttcctttctctgttcaacaacctaacctttctgcatgtagctcccttgggatgtttgtaagcttgaagaagagagaaagaagctccctctaatggcaaaaaaaaatccaaactttttgtttttcaggattgggatctcaattctcatcactcatcactcttcttgcatccccaactattgatggttagtgccttttttggttgttgatatgatgttcttttttcctcattctagatttgtgtgtgtggttgctgttgctgtgtgtgaatggagcttggtggtttggctgcttgctctgctggaggaggatgattgaaagggtcaaatcttttttaaaaatattttttggtgttagtatttttttccttggttttgtttctatctcctctgactttttctggggacagaggagtgttcccatggaatccatgaaagctttggggaaagtcaaggaaaagcaaagcagagtatattgctagggacacccacatgagtacacctagcgtctggaataaggaaattgcatcagccaacaagtgggccaagaagaacacgtcctacttgaaagtgtgatgcctaatagtgtttagacatattggttatatctctcgaaccctcgcttgctacagttttttcccctctcccgacccctcttcctcctcgattccggcggcctcgtcgccggcggagggagggagaggggttgtcccccctcccctagtatagtatagtagccgggctagtctcgttaggtcgggttcttctcgttttgcttctcgttggtgtggtatggaggttggagacgacggcggcattgcggatgtagccagtctcggtgatggcaacgcgattacgaccgaagatgatggcggcggcgcggatccagtccgcggcgatggcggtggcggcggctgctcggatgcggtccgtggcggcggcagcggctcgaatgtggcccgcggcggtggcggctgcgctgttgctgcctctggcggcaatgactgcactgttgtggcctacgtcggcgtcggtggtgttagtctggtgcttctgctccaccttgtgcaagtccgctcttccccaacgttgtgctatagagaacagttcattcgtcgatggttgtgctcttcactgcatcagggtggctggatctgggatccttcttcctctttgtctccgggcagtggcatccacgctgggtgtgccattcgggttgagctcaagctcctcagattcaatggagaactccgtggtgaagtttggttgagtccggtgaagcttccaccaaaatctacggctcaacagcaaatctccaatttgtgcagtttctgtggaggcgaccgaaggggattaacggttcgtcaagcggtctgcatgctaaaggagacccaaggttgcaattgtcatggctttgccgctgctccctgtcgattcgcgccttctgcactgtctagttttaggaggttgtttgtgttcttgttccagttttctattctgtgcatcttgctgtctctgttgatgatgttcgggggcttgccctcttgatctgttgctctaatatatgtgtttaagtttcaaaaaaaaaagacatattggttatattagtattagaatattatgttctttaatatgggcatatctaggttaaattacttggtttaatttggttgtttagttgcaactagtcgtgctactattattcatgtctatgaatcagaatcatttcaacgctaataatattaacgcactagaattgagtgtgtttaaataagacaaattcatgccagttaatatatataattactgcacatgcatcctaccatgttaatttattcaacatgctgagttgtttatgttgatgaatccaaatcattttgccatgtaaacatcaattcactacaattaagtacgattaaataatagataccacaaatagtatcataaaatccaaaattgaatagtatcttgatatcttagctaatactattccatcataattttttattagataactataccaacacaaatgcttcgctatataagtaaaatcaccatcaaacacagccaacctactaccacaataatttattcagcatggttcaccgtattctagccaaccaaccaagcatacaccgtatgtgtgttaccatgcatgctcacctacccaagtggcctcactccaagtctcgtattaatcattgcttatttttctcacatggcttcacgtaaaatatagtgaaaaaaattttgcccacaaaataagagacgctgcgaatatcccaccagctcagaaaacatacgagccaaaggcccaaagtgaaaggagaggaagtgtttttgccttgtcttaagtgtggttgcaaccgtgtgcaccaagggatttcacttccctcgtgtccaacccgtggccctcgttcgcctgccccaaccccccaaaaggtcaacacggttttggcctctgcctgcctgcctggctcggctgcctccccccacactaaacacttttaccactaatccagtaggagtaaattaatcaccacgaggggtaaagtttgagcacaagtggattaattagcggtcagcacagtaattagcacgcggtttaagggagatgtgacaagcgtggggaccacgcgtcggacggtgtctggtggccgtcggatccgcgtggggctccagactgacacgccaccttcgggaccaaatcccgaggcccctccctctgtgtgccgcggcgctttgcttttcgttttttttcccttttcttttcaggggttcttggaaggctggctgaactgagattaaagaaggataataacattaaggtaagctaactaaaaggacacaaatactccctatgaaactagccgaaagactcctgagtgtttcttaattactccttccatctattttgatagtcatattttcaaatctgaaaaatttatttttgataggcgtatttcaattcaacatcctattatcttaatgactttctcggatttaatgtatgactctccattcttccatataagattggctacatggtcattaagaaatgtaaatattaatgaatcgcttgtttacgaggaatgattagtagcatgtttaaatggatgataagtagaataacttatccttggtctgtgtgccaagatgaaaatatgactatcaaaagtagagggagtataggctaactactccctcgttcccaaattgatcatcatataatgaaatttaaaatttcttaaattgatcatcatgtaaccgcatagacacggatttcatcataatacaattaatgcagcatgagagaacatgtgcatgctaaaatgtataattgacatggtgttttaatcgatgcatgcattgtgggagaatatgtatatggttacttcattgatgtgatttaaattatccttagtctcgatacataaacttatatgatgatcaatttggtacggagggagtataagcttatgtggaaaacttataagctaattataagcttatgtgaaaaaaaagagataaacgaaagtaagaagtgttggcttttatacaatagctagttatacacatgctccaatatatttacattaaatttatagtgagataaagagagaagagagaaaaaaatagagccaacattatagtgttaacctattatacatgttaattgtaatatgggccaatagccaatactccctccatctacttttgatagtcgtatttcatcttggcacacagaccaaggataagtaattctacttatcatccatttaaacatgctactagttattactcataaacaagcgattcattatcgatgccaatgtagccaatcttgtgtgttagagagttatgcattaaatccgagaaagtcattaagagaataggctgttaaattgaaatatgcctatcaaaaatatttttttcatatttggaaatatgactatcaaaagtagatggagggagtagttagctatactatcaaactttgctcatacaatactccctatctcaaaatataagacacaactatttttttcccatgtctcataatataaggcgtgcatgcatatgtacattaactatcaccttttagttctttaaatttggtttattttaaatcctttaccattaagccctccaatcacattgcttccatgtatggatgtgatctaattaaggaggtgattaaattctttcttaatccttactccctccgtactcgtaaaggaagtcgtttaggacaatgtttgagtcaaaccttgggaatataaattataaataactctcaagttgttgagtttgaaaatttaaaaattatatgaataaatttatcttgaaaaataccttcataaaagtatatacatatcacttttcaataaaatttttttatagaaacaagaagttaaagttgtgttttggagattgtgtcgctgtccaaaacgactatctttacgagtacggagggagtatgttaggagtggctgagtcttatatcttgagatggataaaatagtttaatataactatatactacgccattatatttggctcacctctcatgcgcatccactatcttggagctcatattgtacatggctataaatttatggtctgtttttcttctctctccttcatatgtgtttgtagctagcttgtagacttctactattgtatttgctcttaaatataagtaccttttaacttctattctctcgattttcacatgtgaacttctcaaactactactccctccagttctatataattgacgttttggataaggttgaggtcaaacttttataactttgaccatcaataacttcaaaaatatttagtttaaagaaactagaacaacatatatagatttgtctttcaaaaacactataataaaagtaaacatgtatttatttattgtgtatattataatagaataataagttcaaagatatattttgtagaccgtgtcattgtccaaaacatcaattaaaatgaaaccggggggtttacgtagtaaacaacgtattttattaaaaaaattatagaaaagttactataaaaatcatagtaatctagtgttatggtttatttagctaatacttgagtaattatatgctaatccatcatttcgttttactcgttggagaggaagggtttctaacacctctagacaataaacaaacacagcctgatttttagctaatacttaaattaagatatgccatcggtaatttgaaaccatgccattataattttgtaaagtttgagatatgtcatcggtatctcaatgacatgtaggacccacatgagtcaatgacatgtgggtcaggatggcatatctcaaattttgcaaaattataatggcatggttccaattttccctaaaatcaattatgtgttaattagtcatgtgttaagctatgttctttttttcttgtgcgacatgatgtgccatttggactttggttcgttgaataacgatcgatgggttgtgacggtgtcaccgatcgatcgtctacctacttgtgcttgtgctcagtggtctgcgaggacggttaacaggttacggagatgaccggtttcacactctgggcccactggtcagtgtgctcagccagccactaaactatagctttatgttgtacttaagttgttgagccagcttcaccatgggtccggctaataggagcaaccactaaatggtcttgcatgcatcttgaaaaggataaataactcaataattaatcttcagcctagtcatggttgggtaagggcacccacaatggttatctataggctctctataagagatccatgtcagcatattttcctacttagaagagattaaatgaagagagagagcaaagctatctactaacctggagatagtctatagagaaaaacgaggcaatgtattagagagctatagatatccatgtagacatactattgagatggtttactattattctagtctattgctgagatgtacatgttttatagatagcaccttactttaccattgcgggtgctctaagaaaataaactcacgattataatgcgaggcgaccatatcgagaaaaaagatttaagataaactaactaaggtgcagaatataaggtaatttttgttacacgacaaaatgtgtactggtgaacataaaaaaaaagtgccatggctagaggccatccaaaaatggtattttgcctgaagaaatttttagcctacatgaagagagatattatttaaaaagacgaggatgcctttggggccacaatattttaacctagcgctggagaaaaaaaattgaaattacgcaactcaaaatgtcatcactctgagtaaattgctagcatacacatcatatatatcccattttcacttaagcgtcaggttgttagaagcttgtagcccaagggacattcttcaattggatcgaaaatatcctttggaattaccggttttgtagttgtcctctaccgcggcactttttatgatgtccacgacaaattataaaaattgtgagtatcctattacaaaatttactgtataatattggttctttttaataatagttgccgcttcaaatagtaccatatgaaaaaaaaaggccatatgtatcacatttttaaagttgcaataccacccccaaaaggtaggtatgcataattcatggtttttgagttcggccattctccaccttttgtgaccatgcatgtttgtgaagaatttagatcaatttagccctcacatggttcagataagccggtaactttcttgaacggataactagctactaggagtagtgtagtatatcttcataaatattaatccgaaatagcacttacctaactttatacagttttataacatgatctatcctttcttctaatttgtaaggtcgagtagacatgcatcttcgtaaaagtacattatattcctatggacatcctcttgcatgcatgacaacacaaggcatacttatgttgctagctagggtgctaggcatgcaatatatattacagtatagcttgttattttaaagagtgaagtgtatgggcagtccttaaatttgtacgaatgtgttatctagatctctaaactctcaaaatgtttttgggtccctgaacttgtcatgagtgtcatgtaagtccaaacgggctccaacccgctccgtgagatgacgtggcatgccacggtgatgcttacgtgtcaatgggatccacatgtcattcacataaaaaaataaaatttaaaaaaagaggatagagagaggagaaaaatgatgtttttaattttgaaaaaataaatgaaaaaagagaggagaaaaaaatgttcttaattttttctatatataactgacatatggattctactgacacataggcgccaccatgacatgtcacgttagcacacggagtgagttggagcccatttgaacctatatgacacccaagacaagttgaggggcccaaaaatacattttgagagtccagggacttggatgacacgcccacacaagtttagaaaccacccgtacactttactctattttaaaacttatacttctatactcccacactactaatcctcaccgcacatacacacgatataatccttttacttctaaaaccctttagcaaaatctttaataaacgccttttgaaaaaagtattgttaaaagtgaatcttttagccacgtcaccagtcgaaacgatacgagtagtgtgacgcctaaagggtttaatgctttgaatgctatgtgcactaggaatgtctagtaagactaactattgttgttggtttcatcatacaaattaacatactcattgatttatgcgtgtggttaacatatatactccctccattcgtagaaaaaaaaatcaacttctagggacgaaatctgaataaatacatgtttagatttatttctacaagttatttttttaggacggagggtgtatatagtctgaatttgtgtccttcatgtaatcaagaaaatcatattagaatacgtaaaaaaaaagtatttcagcgttgtggatgtcctctgccgcagaagaccccacgccgacgtgtcaacgtgctcgccgcacagccggacagcaacggagcggccggccggcggcgacagggacggctcggcaaggcggccaaaaacttggttatggtcgccatcccggacagcgtgccactgtatctcgctgctctcgcctctcaactaattaacattatcttcctcgtgtcccccctaattaataacccccacgaactagcagtaattagtaattaattagtcacgtcttaatcctcctcctgatcctaatggctgatgcaattagctgcaaagcgcaattagtagtacttacagtaattgggggtgatatatatgaatatgatatcgatctatgtgatctcgctgagtcgactgcactttctcccttttagttacacacacgtattactactaggtgctcgagatgcactaggaacagtaagattcaattctactggctttggtttggtcagtcaccgatcaatcgagtgcgccgccacgattgcggctacgtgtttgtttacgcatgtgtttttgctgttttagtgcgggtttcagccaggataacacagatacgtcttaatttaatcaatgttttgtttttgggattttgggttgttaggaggaggcagagggtacgacgatttcggaattcgtagagatggatcctctacattcgatcgaatatggatggcttgaattagttgatatagtactagctgtacaccacattttgacattgtagtagaattgttttcacattgtcttgttttgagagcttctatcaaccgtggtttctcttataatcattcgatcccttgaacaatcgatcttttaccgaggtggctaaaaatcataagctatataattttaaaataaaataaaaaccagaatctagccaaaagccgaaaaccatttttcctaccaccaattgcctctctgaatctcgagctcccaaacagagctaaacagaagtatcttacaaacaataaattgtacgaaatgggtgatattttttaaaaattttctatgaaaaaaaattgtttgaatgtgatactcctacagaattatcgcgaaattctagcagtattccagaagctgaaggcagaattttgaattgatctagtgtcctgtagctgcgcctgcgcgtatcgtacgcatgcgtgatggggactgatgcatgcgtggtttgccaccatctgagatcccggccgtacgcgtacgtgacgcccacgggcgcgctgcctctgctctacgctcccgtgtcggctcgccgccgtccgccgcgcgtggcaatggcattggcacgccacgccacggacggacacagcacacgcgcgccgacaccacgagcagcgcgacgcacagtacacccggcagcggcatgtgccccgcgcccgcgcgtggatggatccgtgcagtgcagcacgccacgccacgccaggcacaacaccagtcaatacacacttcatacaaatctgcagttcttgtgtctcaccaaaagttatgttatgtggaggcacacatgttgcgcaattcccagcctgtcaaacacacggattacataatgcaatgtcacctcagcttaatcactctgatgatcttgattcactagatctcaatacaccggctccagttctttttaccatgacaactcttgacgatcttttattattaactaatctgaatacacggctcaagcttttgcacaaggacgagagcgaggaagaaaaggaagcttgagaaaatgggatgatctctgaatcaagcaagaagggtaaagggtaactaaaaacaagggcagggctgggcaggacggggaagggttttctgatgtgttttttggtcaggcgtgcatcgtcgccgtcttcttgaagtcgatcttgtcgaccttgacctcgccgtcgatcagctcgtacacgtagacgaccacgcggaggccgtcgatgtccatgagcacgaagctcgggttcacgtcgtaggtgatgctgctgtaggcgcccgtggcggagccggggttgatgaccactcccccctcgtgcttgtacgccttgaactggtgggtgtgccctgtgacgaggatgtccacgtccagctgccgttggagcatcgccagggagtccaaatcgccccatggaacaacctgatgattgcatggtcagagaaaagattaggatacactgcaaaacaatctcaagtttgacactgactgatcagactctttggcatgtactaacaaaaagcaaggcagattattgacccaatatggcacttgtgtacagggattcaagacagacaataattcacaaatgaatgtgcttgcgatactcccctcccttaagcacgtcaattaagatagtttcaggttctcatacatagtgcaagacatggcttactcaaattgttagtggtgcgcaagatgtagtgcagaatatggtgaacgcagcaacggatacagtgaaccaacatcgtgaatggttctgcacaagtcaatgttcaagatacagcacatggtttgttttctttcctggtggtgaacatgcttatgtccccaaggaggaagtatcacgtcactttaaggatatgggtgcttatgtccccaaggaggaggtatcacatcacttttatggatatgggtcaatgcaaataggttcaacacttcaatttactgtgactatccatgaagcctgttgcttgatgagatgctgcaacatgtggaaagcaaatatacacacacgctcatccactaccctgcagtcagtgggaaaccacataacatccattgaactaaataacatcttttttgcatgagccctagaccatttgactgctgaaatattgcaacatctcaagttgccaaccatgtgtcgtccatacatgtacggtgtacccacataaaaataaaaaatgtgatatgtgtttcaatcccataaattgcaaacatttccataagctaacaaaacatcccaacaaagaaactagcaattaacatggagaaaaacttagccgtgtttttacaagtaccttatggggtaaagtagacatctgaagctatagcaattccaactaaaggtacagtggaaatgtccttgttgatcactaactgaatttagaatcgatagtagtagaatatttccagaaaataagccgcaattttgccgcgatggaatgacctaacataacgcgatgtgttaaagtgctttatctcgccgcaatcatgcgagggtgtaaagaacaaacagcactccctgttcaaggatgcaaaccatgtagtgcctgggttacaaaccactacaaatatttaaaatgtttagcccaaactccattggcatttgaagaaatataagcgagaaggttgctatagatactagcattgtttctttatttatagaaacaaaagaagcaaatattctggtttagcaagaataaaatattcttatattcattcctagtagtgtaacatttaattagcatggcctcatgtggaacaatatataatcacataagagcaagtactatgggcctccaagcacaagccctaagatgccacataggactaaatggtgcggtggaggagaaaaggtgtgtgtgtgtgtgtgagagagagagagagagagagagagcgagagagatacccctcatgcaaggggcaacctatacacaaactccaagaaaaatgtgagagtatgaaaagtattggggtttgtgtgttagaggtaacatgttgtacatgctatctctcaatttataggttgatgatgtggactaaataagaggtagcagccacctctactataaaacttgctctatgactgttctaaaaaagtagcatattaaaagtctagtatccctgattcatggtcatgaagctcatactaacaaggcaagtaatagttctagagtcaaaagcaaacctgatgaccatggcacagccctagcttgaactgaccaatagtaagtgtcttagtctctgggtaacgagcatcctcatcatattcacctctggttatatggagatcaggacaaaggcttttcaggtagtcatgaacttcctatagaaaaattacaaaaaaataaaaataaaaatcagtccgcatttcatcagaccaaaagataaacagttccatacagtaagtctgtgtcaacaaatcagtagatgaaaaacaactaccttagtatcgtcctgataacatgttaatccaatacaaagttcaaaagcaagaacagtccaataaaagaaacttcacaaggatcaagagccattaatcatgcaaagaagctgatgaaaacaggcaaatagttcttcggctgttatttcatcatggccccacaattttgtggcatggatccttaatcctctaggagagcttcatattcttcactcactttaatatggtttattgtgcagccctctagtataaacaatttcaaattgctgtcaacagaactgatgtaatcttttgagcttcgtgtgcttggcatctataaaaccctatcactttaatacggtttattgtgcagccctctagtataaacaatttcaaattgctgtcaacagagctgatgtaatcttttgagcttggtgtgcttggcatctataaaacctactgtatggtttacacaactcaacatcttgcaccgctggtatgtaacagtagtccttatttaaaataacaattgttggcctctttcacctggctgcaatttaactttatttaatggttgttcatagctataactaagccacgcaggtggaagcttgagcatctcctgtgagcttgaatcttttactgttttttgtactagtatcataaaataagctgaaagcagtgcaagcatgggcaaacaggttatttatcatggtaatcactctatttgaaaatattgattatgtagcttctagaagccaactgtttacatttaaacttctaaagtgtgaattgatcatccaacttgtaacagcacaagcatagttctgagtagacacgatattttggcaggcaaatagagttcctttaatcatgtacctcggcagtacataaattatctgggaaaagctcctcatagtatcagagaaaagttcagtgaaaacaatctaatgagagaaagttcattcgaattcaatttcaacattaaattcaatgtacagttgtacattgagagtttacccctgaatttctaacgagaaatggagatctctgtcaccaagatgtgagatgacaagagtccactaataaattggagaagctgttacttttgagaaagcatcaatagtggggaaaagagtgacccttgcaaagatgccacacaaaaggtaaaatttaaacatcaggaaataagttcaccaatcataacactaaaatttcttatctcaaggggagaaggatactgactctatctactctagtgcaactatcatgaagtgtctgttgataggacaacctagatccccttaacactctgttagaagaagttttactatatgtggtgaccaattatttgtttccagaacacttcaaagtaacaactgcattttcttcgagtcgacgaaattcataaaattctctgtgaacgtattgaacaatataatagaaaagtagggattaagaataacggtcgcatagttcaagtgggggatgggattgctcgtattataggtcttggtgaaataatgtcagtcgaattagttgaatttgcagaagggagtactaggggtattgctctgaatttggtatccaaaaatgttgggattgtattaatgagctatgagttgatgatacaagagagcagttttgtaaaagcaacatgaagaattgcttagatacgcgtgaacaaggcttacttgggtcgtgtcataaatgctctatctaaacctattaatgggagaggcaaaattgtagcttcggaatctcgcttaattgaatctcctgctccgggtataatttccaggttttctgtgtaatgttctatgtgtgtctatcaaggaccaagtggcacctctcgtgtaacttggtgagaacaatgcaagcgtcaccaactggaatttaagctcaacctccaaaaaccaggccctttgctaaaatcaaaaccaatggtgctcaccaatcgtcaataggttttaagataatgaagcatcacatttggccccgtttattttcttgttcttcctctttcggaattacatttgatcccactatctcttcaaatatgtacatttgatcctaatctttgatccatgtaagctcacgtagtgttaatggtattcatccccacatcattttctccctccagtactcaaagtagttattgtacctctgctttagataaactgataaactagtagtactagtcaaaatcatacgaccaatgaaccaaaggtaatctcagaccaaaatcggcgttctctgattccaacgagagggcgaatacctcaacaacagattcgctgggcaatgctaaacaggacgctacaaacaaactagtcaaccatgatggggcgcgcgccaagcacgagaaaccgcggtagggaaggggggtagcggccgctaaccttgatgcagaggttccccgtgcagatgatgtgctggatcttgcccgggacgagcatggacttgaacttggccggcaggtcggccgcccggtgcggcacgtgcagatccccgagcgcgagcaccagcaccatctcctcctcctcctcctactactcctcccctccttcccccgaaccggaaacccgctcctctcgccgcctcagtccgcgccccttcaagctcgccgcgatccggctcaaatccctagccccccaccgccgcgccccccgaggtgagtgagagggggggagagctcgatcgatcctgcgggcgatcaggaggggatcgggaagaagctccccgccgtcgccgtcgccgacgccgccgccgccgccgcgaccgccgatcggattcggaagttgtgggggatctctgttttttttttcttttttctttttcttcctcgcttcgagcgttggatgcggagaggaggaagaagaaagagcacgtggggatacgaatcgaattggacttctccggtggagaagcatcgatggggtgattgatgggttttgggccggaaatttatgggcctccattgttgtcacgtttgtcatcgatggggtgaagttccagttctgctgttctccttgtgatcttcttctacctgttgtttcttggtactattctctccattttcaaaatttcaaatgtatagcaatttttcttatatttgataattaattttattaaatttagtgtagatattaaataaaatcatttttaaagtacttttgacaataaaaaaattcacaacaaaataaatgatatacttacgtagctatgtagctttttttaattagataaatgatctaacgagtacttaaaaacttgcatttaaaacgaatgcgctaaagttttagtgatatgacaaggataatttctgcggcgctgcctaacaaacgtgtctctgggacacccgactcaaccagctgatttcctagaaactgaacttggttgacttcgcaatgccctgcatcattcctgccccagttttctgctaattgtaactggatttgagtaattcagattatgttttcttgaccactggagagttttttaaaaaaaattagggagtaggtcaacaagggatgaggaatttggctcttcatgaacaacacttgtcacacttgtacggcataagacaaaagggatcgtgattcgtgagcgacttttgtttctccggtaatctgattacgcaaagtgatctaagcaattaggattacgtctgattcaagttgatctaaacaaattagtgtcctatcgaattatatacgacttgttcatcaactagaacaccttgtattgtccttttaaaaaaagcctctatgctatgcttttgttgcagaatgtgttcgtgttggatgatgtgtttgcctctaattatctctctcaggaattgattgactcctccgttttaaatatttgacgccgttaactttttttaaacatgtttgaccgttcgtcctattcaaaaacttacgtgaaatatgcaaaactatatatatatatacacacacacgcacacaaaagtatatttaacaatgaatcaaatgatagtaaaagaattaataattacttaaattttttaaataagacgaacagtcaaacatattttaaaaagtcaatgacgtcaaatatttaggaacggatagagtataattgggtagctgtttgaccctccaaggttccgaatgacacagtgaactgatcaaggtttttctttttctttttttttttggcaagactaataattgatgaagaacatgaaccaatcaggcactgcttgtgtcacaaccttaaccatccaatgctgcaccaacaaatgcatgcatacggctatcacaattcacaagtggctatgttttctactccttttcttgcagctaccgttctgctttgagaattcgcgtcatgggcgtccagtggtattgctgatcactgttgttgtaacagtatgttgctaacaactattgcatctttttttggatagaaagcatagcgctgacacttgagatcaacgagagcctagcaacacttgagatcaacgagagcctagcgaccaataagtttttattacatggtagatgcacaagcatgcacatcactgtatacataacaccatacatgtacaatcgtaaatacacccctaacataggtaaaattcctccattcatcgatgcctacaagagaaaaactctctataggcacataaacatgtggttttatttagatattgtcacagtttaggtagcatatgtttgtaaaataaaatatgtagtattttgatttttttttcatgtgtcccatctaaatacctctctcttttttaatatataacgttgttaacttttaaacataagtttgatcattcgtcttatttaaaaaagtatatgtaattatcgtttattctgttgtgatttgatttggttcttttaagtatgacttatagatttttctatgtctgcacgaaaattttaaataagacgaataatatatagaaaaagttaacgcatcatagatttagaaaaacggatgtagtagtatcttatagtgtactagctagtgcataaattagtttggaagtttgaccaaagttttatctaaaaacaatagatctcatgacaaacatccgaagaaggcaggcactagctagtgtgatccatgcataaggagcttgaactgacaaagatcaaactaaactattagtaacaattttaacacaccaaaatttagcctaatacattgcatgaaggatatggctaattatgtgcagcctaatattaggctaaaaataccgtcaatggcatggatcacatgccgccaccggcttgtagtagtttcagcaatggtaaaaaaaccggaccagctattgaactgatcgaagtgttggttcaccggtccaccgattggaccgacggttcgccgattaaactgtggtttgtaaacctttgttaggtttcatattctctctatgccacatggcccacatctagtccacagcctaggtcactagaggaagctcccatcgcagtcacccatgatagaatcccataattgctcctattttgacctcttttttccatagaaatgtgccttcaaagcctatatttggccttaaagtggcccgagttctggtgcagaaaacgttgagccggccagatcggtctccatcggccacgattcactagagaaatctattggttttggccttttttttactagttcaattgcaggggcggtcctgggagcaggtaacggagccgtctaaagtactggttttggttttttcggttcaaccatggtccggtacggttttttccactagggtcttttccggttccaccatcggtccgatctttttttcactaggatcctagcaacaaacacacggaaaagctaggtagagcacgcacgccggcggcgcgcgtttcaggcccagaaggcccagcaccgctgcgccggcgcgcgcgcgcctcctccacgctttttttttttgtttttttaccccttttttcccacttttttctgatttttttttatctttagcatgttttgagtttgaaagtttttaaattttgagttgaaaattttcaaatctaaacttgaaagttttcaaatctcgatttgaaaattttcaaatcctggatttgaaagttttcgaatctcgggttgaaagttttcgaatctcgggttgaaagttttcgaatctcgggttgaaagttttcaaatcttaagttgaaagttttcaaatccgagttgaaagttttcaaatctcgagttgaaagtttttaaatccaagttgaaagttttcaaattcgagttgaaagttttcaaatttgagataaaaatttgaatgttttcaaaaattgacttaaaaaattcaaatttcaagtcaatatttagaaaactttcaaatcatattttaaaaattttcaagtcattattagaaaaactttttactcaaaaattcaaaatcattgtttctatttttattgagaaattactgtagcatttcatgattagtgctaattatttagattagcaatattgcgttgtttttcttccagaaaagcgctaagcgcttgaggcggaggcccgcatgcacgcgacttaaagttctcgcgggcatgcgcgagctagccacccccgcaaacacaaccgatcctcatcctcattcctttgcatgaccagtgaccacatatatatatatagggtgtgtttagttactgaaaaaagttggaagtttgaaaaaaaaagttaaaagcttatgtgtgtaggaaagttttggatgtgatgtgatgtgatagaaagttggaagttggggtgtactaaacacggccaataagtggttttcgatcaaaccacccatggaaggaacatgtggtttaattcagggtggtatcgcacttcacatggggagaaatgctatttgggcaaaagctgattgcatgtgagaggcagcctagctgggacggggctagtggccacactagctatcccaataatttttgcgagggtataaacactattggctgattggttgattggctttccccgacaagatatttcgtagcggatgtgttgctgccttccaaatcgatcaataattcagcaattcaattagcgatcggtcggtcgagcacaagctgtttctgtctgctcattaatttattaaccaacttgcttttcgaagcgttcgtggtaatgctgctgccctgtcgactttgtccatgagatcagcccggccaatgttggaatttgtcggagtccagaacacagtaatttgcgcattacttcttttcaagcttgttttctctaaataaaatgtaaatcgtgtgtctgaaatttagacaatcattattttaaaagctatttatacatttcatctataaccatacaatctgaaaccaaaacctagctagcgtccctatcaacccttaaaaaaaaaccatatccatatccctttaactttagttttatgccaccacttttaatatgatgctacctgtgtcatataatgtaagcgattttccctgtataattctctctcagacactgtttcggtacactttagactactaaaggaaggtagtggtagtagaattgaaatctaactatagatcttcatgagtatataattttttattcaacacttttttgagaaatatttaccaattcatctattttaacattctctaccgaatgttaaaacatatgaatttatcacaggattatatattttaattccaaatttagcactacaacaaaacgcaccatcctcgtcccactttctcctatctatggttcctacagtctcagataagtgtgtctctctttcttgtctctagctattgttaggccgatcatctcctaaacattctcatcatcatcgcctacatccatgttctagtatcattcaccctctattggcgtatgaatccaacggcgccaccactgccttgccattatcatctagctatgattgttccaacctttcgctaatcaatcttacatgaaaaccccccaaccatgactaatttctaccgtacttatctagacaactgtgcgaatcaacataaattctatgcatcgtccaacaaaatttatgaattcaactgttctattttttgaacgaaattattttggtagagctatgggtttttacgcccatttaaagtgagaataacttgcccaaccaaaattgacaaattctggtcaaagacaacaggaataataaagagattatcatattaacctatacccttgtagataactgcatgaccgactagtcaaatgaaccattgagagttagggtgggggaaaaagaccaagaccgaggacccgattgaaataatcgagaccgagacaaaatttcgctctccctactcaactaactaaatttccttcgaccaattcggttagagtcctcggtagttgaattaaccaaataggtccatccaaaagtaaactctaaatccccacttaatgttcgacgattccatgaacgcacgcacccaagtagtagttcatttgcagccttgcacgattgagcgtaaccacacctcttgctcgcatgtaacgccgcctctgcctacatctcactatcgccaaccgcatctcgagacaacctgcatcgtaggatgccccgaccgtcgagcccacccctccgccaaccgcatcaaccccgtcgcccattgattgcgtcgcgctcctccgctttgatgggcatgggtggcacttcctttactttgacgacgatatacgataacttcgggtaacacctccacaatgaggttgactacgacgaaaggccaagtagccaatggcccactgcccgatctgagatttttttcctgtgatattggtgagttttttaggtgtactatttattcgtgattcgtgtgttttcttgacctgctgaaattttggtcatcaccaagaccgaattgctcggtatttactattttacaatgcaatttggtctccagttttaaatgatggaaattttctaaaagattgtagaccgagaccaaattttcggtctaagggtctgtttagatctttcaaaatggtaaaagttttgtcattttggagcactttttgccattttaaatctaaacactagtaacaaaagttggcaatttaacatttggcatttgctagtctatggtagcaaattttgctaaaaagtgttccgggaccgcaccatctctctttctctctctctttagtgctaaaatgataaaactttaagatgtatttaaacaccaactagtacttttgcaatgacaaattttttgccaccaaaacttttgtcatttgccattccaaatggatctaaacaggccctaattgaatacccaccacctaagagcaagtttaatagtatagccaactactagctctaattcatctatagccaatctaatagctcattatacaatagttacatactatagtattaatatctggtcccatctatcatacacacgctgcgtcttggagtccgtgctacagctggctacaaatctgtagcccgctgcccttttctcttcttatttatctccctaaaatatgtttgcagctagcttatagcctgctatcgtacatgctctaattgagagggtaaaaagtgaaacaatacctgtgtaaaataataatataaaaggatttcaccagtctacttggaacacacttttggcatgcgtggtgtgatgtgctgttgctgtaaaagcgatggccaaactggacgagtccctcacgggctgccaccgctgtttatcagcttgcgtgcaatgtggacccgggtctccagtgactggccggccagctttcaaacggctctttcccagaccacagtgacctctgcgctgcgcatacgaggttttagtatttggggtattgggagggacgagcggctttgcttccgtgtgcaaaagctgttgggcctattgattctttaatttgttttcccttcaagtgcaaattaaagctcaagttgcgctgttaatatattaaaaagaggggctcaagttgcagttttcatattaaccgatagatagattctctctttgatttggaataaaagtagaagaaaaagtacgaattacctcccgaactatcgtggtcgtccgaattaccaccctaaacccgaaaaccaaacatccttcaccctcaacttttaataccggacaaattacccccctcgacccaatcctaagcggttttgccccacgtggcgtacgcgtggcagtccagtcagcattttatttattaaaaaaatgtgggacccacatgtcatactcccctctctcttcctctctcttctctctctcactctctctctctcactcttcctttcgctttatcgctggcggcgcagacgggggatgcggcggcggaggcggcagcgggtgacacggacgcggcggctgcggcggcgggggacgaggcggcggtgtcggccgcggccacgacgagcaggcacccctcggcgcggggacagatggaggcggttgcgggcggcggcgcgggacgcagagacggaggcggcggcggcggccacgacgagcagccgccccctcgcgcgcggagtcggacagaggcagcggcggcgggggacgcggaagcggcggcgcggcgggcgggatggacgaacggcggcggtagcggcgaaccacgcgagcccgcccccgctgctggcctcctccaggagctcgccgctgcgcgacgcctccacggcgagcgccgacacgaaccccaccatcgccagccgcccgttgatcggctccggcgccggcccgctgaacgccagcacgtcccacagccccgtgctcgccgccggcttcgccttgggcgccgccgccgcggggctcggagtcggggtcggggtcgacgatgtggtcgtctcctccttcgtcggctccacatccggctgtagatcgatcgaacgacgatgacgaagtcgccccaagttagcacacgaagcaaatcaccagaacacgcacagtgaaaccaatcaagaacgctcagctaacctcggtttgggccctaacgacgagcgcgacagcacgccggcgaggcgggaagccaaccgcggcgcggccggcgccgacgacaccacgccatggcgcgccaccagcggcggcagcggcgaaggaggagctcagcgccatggtagcagccgccattgttgctaataactcaaattacatagcagatgaactcaggcgagctagttagatcactcttttttctttttcttcttttgatgctgctgctgttgatgatgaggcgggtgacgagacgagtataaataggcgggggatcaaggaggaggtcacgagggcacgcggcgaggtggggagtggtggtggtggtggcagcggcggcggccacgtcggcgagggaggaggaggcggcgacgtggaagacgaggggttccgcgccgagggggtggctgctcgtcgtggccgccgccgcctccgtctccgcgtcccgagccgccgcccacacccgcctccatccatccccgcaccgaggggcggctgctcgtcgtggccgtggccgccgccgcctcctcgtcccccgccgtcgtcgctgcgtccccagcctgccgccgagtcgcgccgaccggcgagaaagcgagaggaagagtgtgagaggagagagaggagagagagagagggaggggagtatgacaggtgggtcccatatttttaataaataaaatgctgactggactaccacgtgtacgccacgtaggacaaaaccggtctggattgggttgaggggggtaatttatccggtgttgaaagttgagggtgaataatgtctagtttttgggttcagggggtaactcggataaccgcgatagttccgggggtaattcgtactttttccaaagttagaaatggatgaatctttaaacaattccaggacgagagcttaggcaattggtaatccactagctttagcttgagctagcttcagtgagatacattgttagggctaaataagggcacatgaaaaatatataaattagctgtatataattcttgcccatgtcatcgagccaagtagacaagcagtggataacataatagatagacttccatcactttatctatcctttttccaatgaggctgcacaactagcactttatttttcttttctcttattttcttcgtagatgagaagcatcaatgaacaactttacaatgacgtgcgatatcgactcacaagaatggccaaatagctcactacaaggccactatacccccaacctgcaggcattcgtcactagttttagcgtcccacacgttagttggtgctccatattaccgatgtcatgcatgtcttttgttctagctagatatctgcaataacttgtaatgtccatatgcacttttatgatttaaaaggccaaatccgagaaaaaggttattttttctccttttatccattttcataatgaaatgtatatttcaatcatcttaactactattttcaatataactacgactatttatttcactttgcatattttttggggcttcgagtcaattaagaaattgccaaaaaaatctaaaccacaatttatttatcataaaatatatgcttaatagtgatgaaactgacatgatatggtagcactttgagatgtgattcaaattgatttttttatatactaaacatgcaaaccgttgatcaacatatacaaagttttacttcccaaatacgttcatttttttcattcatcccacataccaatataaaataaaaaatatataatatctatactttatcaaactccaatgcagttatttttctttatctactttcaatgcatttaccctctacttttataaatttcgatataatataatgatgactaaaaaacagtgggataaaaatatattactactattatggaacagatgtagcatctttttatttgttgattaaccctttcactcactgttcttccgcattaatatcttgttcttccgcattaatatcttcaatcatcacaatccagttcttgcgtcttccgtccagaccatcattgagcatcctaacgaaaaggtcaatagcagatagagaaacaattcaatttcacctgcacatgccatcataattgaaataataatcaagagttaacactggtggagaaaccatctttcgttggtcggactaattccacaatagtcccggttgcaacaaccgggactaaagatcatcttttgtcccggttcaaatgctgtcaggtcttggcaggcccccccagatctttagtcccggttggtaaagatcgtaacttaccaaccgggactaaagatcccggcgatctttagccccggttcataacaccaaccaggactaaagtcccactcctaaagtcccacccctatatatatgtcttcttccttctctagcccgagcaagcttcaaaatttcttcaaaaaaagaggggaggtcatgccaaaatttctagtgaatttattttggtgattatatacaaatcgaaggtgcataaaaggttagcaacttcatcctccaatgttttttttttcatattacatttggagctatgttttgcacacttttttgtctctaaaattttgttgttagttgatgagagagaaaatttgtgtgggggaagaaagaatatatagaaatttagtttatttgctaaagaaggttttataaaatagttgagaaggaaaatatagtgaaagttaatcttcaataatagaaaacaaactaaaacgaaaaattaaaataagtacaacacattaatattagttttaaactttataaatagtaaatatataattatttggtgtaatatttcataatttgtgtatgaataatgatatgtcattatttgtgtgactgttgaaagagtttataattattttataattattgtatgactttcattattgtacgaataattatgtgtgtacgattttttttcatgtcatgtagatagatgtacgctgaccagcggtccaaagagtttattgacggcgtgcattattttttgagagtgaccgaagctaacaggcaaaagggttttatttgttgtccatgcaataagtgtaagaatcagaaggagtattctgcatccaggattattcatttccacttgtttgagtcggggttcatgccaagctataattgttgaacatcccacggagagcaaggtgttgaaatggaagaagatgaagtggaagacgacaatattctagactttgctcagtacgctggatttgaaggaaatcaaacgggcgaggaggaaagggatgctgatggtaacaacgttgcggatgatcttggtcagatgttgcaggacgccaaggaggattgcgaaagtgaaaagagggcccataaattggacaagatgttagaggaccacagaacgtcgttgtacccaggttgcgagcaggcgcacaaaaagttggataccactctggagttcttgcaatggaaggcaaaaaaatggtgttagtgacaaggcatttggcgatttattgaaactcgtcaagaacattcttccggagggaaacaaattgcccgagacaacgtacgaggctaagaagatagtctgccctataggactagaagttcagaagattcacgcatgtccgaatgattgtatcctatatcgcggtgaggagtacgagaacctagaagcatgccctgtttgcaaagcactacgatacaagattagacgagatgatccaggagaagatgacgggcagctaacgaagaagagaattcctgctaaggtgatgtggtatttccctataataccacggctaaggcgtttgttcaggaacaagtggaatgctagaatgatgcgatggcacgctgaagagcgtcaacaggacgggatgctgagacaccccgccgatggttcgcagtggcgaaacatcgacagaaaatttaaagactttggaaaggacgcacgaaacatacggtttggtttaagtacggatggcatgaatccttttggagagatgagcagcggccatagcacttggcccgttacaatgtgtatctacaacctacccccgtggctatgcacgaagaggaagtacataatgatgccgattataattcaaggccccaagcaacctagtaacgacatcgatgtgtacctaagaccattgtcgatgatcttaaactgttgtggaagaaggaaggtgtccccgtgtgggatgaggacaaacaggaggagtttaacctacgagcgctgctgttcataaccatcaatgattggcctgcacttagcaacctatccgggcagtccaacaaggggtataaggcttgcactcactgtatggatgaaacagaaagtacatatcttaagcactgtaggaaggttgtgtacatgggtcatcgtcgattccttgtagcaaaccacccggtacggaagaaaggcaagcactttgaacataaggcagaccaccgtacgaagcctaaacatcgcagcgggaaaacagtgattgctatggttaaagatcttaaagtagtgtttggaaaggggcctggcagccagcctatagagagcgaagatggtcacgcggcgatgtggaaaaagaactctatattttaggagttaccctattgggaattcttggacgtccgccacgcaatcgacgtgatgcacctcactaagaatcttttcgtaaaccttcttggcttcctaagtgtatatggaaagtcgaaagatacactggaagcacgtaatgatctgaagcatatggaacaacgcggtgaccttcacccggaaccaaaggagaaaggaagccattacttgagtccagccagctacactattagcaaggcagagaaggaaagtatgtttgaatgcttggagagcatcaagataccgtctggatactccacgaatataaagcgaataataagcacgaaggagaagaagttcacaaatctaaagtcttatgactgtcacgtgttgatgacacagctgctaccagttgtaataaggggtatcctcccagacaatgtccaggcaacaataacaaagctatgtgctttcatgaacgcaatttcgcagaaggtcatcgatcctgatagattagaagccctgcagaatgatgtggtgcaatgtcttgtcagctttgagttgatatttccaccttcatttttcaatataatgacgcatctgctttgtcaccttgtcaaagagatcggtattctcggtcctgtgtacctacacaacatgtttcctttcgagaggtacatgggcgttctaaagaagtatgttcgtaaccgtgctcgtccagaggcaagcatcgccaaggggtatggaacagaggaggtcattgaattccgcgtagaatttatcgaagaccttcgcccaattggggtacttgaatcacgccatgaagggagactacggggaaaggggactctcggaaggaaaacaataatgacggtagacaacaatttattccgtaaagcccatttcacggttctgcaacaatcttcattggtggctccctacatcgaggagtacttggctctagttcgcgccagaaacatcggtaagtctgatgcatggattacaaggcatcacattgatactttctccacgtggctgcgacaacatctcatgggtaacgagacgattaaccaacaactggccttcctggcgacgggaccatctggctcgatcgctactttccagggatatgaaatcaatgggtccacattctacacgagggcccaagacatgaagagcacggactagaacagtgttgttcgtatcgatgccatgggacacgatggtacaactggcacgtattacggtgccatcgaggacatatgggaacttgaccatggacctctcaaggtccctctattccggtgccaatgggctaggttgagtggtggaggcgtaacgattgatgacagtaggatgacaacggttgaccttaacaaggttggatactcggatgaaccttttgtccttgccaatgatgtaacccaagttttttacgtcaaggacatgtctagtaaaggaaaaaagggcaaagggcctgacgagccgaagcgccacgtggttctcccaggaaaaaagaaaaatcatcggagtggaggacaagactgacgaggattacgatcagtttgatgggcaaccccctttcacggtgacgattgaccctagcatcctcctatcaaatgaagacaccccttactcacgtaacgatcacaaggaaggaacaatagtaaggagaaagtacgtgcggtcaaccgtcaccgccgatgtattgccgtaattgttctgtacacgatgtaaactatgttggatgtactgaatatccatacaaatcaattgttgtatggcatatgttaattatgtatgattattagaatttttatcaaattgaaatcatccatatgctagttatatatgattattagattttttattaattatgtatgattattagaattttaatcaaattgaaatcatccatatgctagttatatatgattattagaatttttaaaggttttaaatcatgcacgtggtatttacatatgttaattagaattttcaacaatttaatatcatgatatgctagttatatatgattattagatttttttattaaaatcatgcatgtgttatatacatatgttaattagaattttcaacaatttaatatcatgatatgctaattatatatgattattagattttgtattaattttaaatcacgcatgtgctatttatatatgttaattagaatttttaacatgccatagtaacattataaaacgatgcagtatttgaagaaaaacaatagagcatttgcaatataggatcaacatgttcaagtggcaagcatgacttgccttgctctgcagctggaggaacctcggcgactatctcgaagtacaccggagcgtcggaagaaccggaatctaagcgacatacaaagcaaacaatacaaacaggctataagactactgaaacagagaacaaaaccatttttaatggattctacacattttcttgatttactgagacttgaatgggcttaaacggagctcggatgaattagttatgaattttagaagattcactgtgtttattactataacaaaaagtccttaaatcatttattgtgcaataaataaatcccggagagagagggggcggcgccgacaagcgggcaccacatggcagcggcgcacgggtggtcggtctaccatggaccgggaccacgcgggtggtccaccaccggtccacgggatcgacggcccagaacggcccggggccgatcggacggtgcggcggcgacctggctcggctcggctcggcacaaagccggccggccggccatggcaagggcggcggcacgcgcgcgtccaccggtgacggcaagcggcggcgcgggcggcggcagcggacggcgccccggcggcgacggcgaccgaagacgacggcgagcgcgggtggcggcggcgcacggggaatcggggaaggaaagggaaaggggagggagtcctcaccggaggggacggcgacgaccggcgacgaggagcgacggagggaggtcgacaagcggcggacggggaccgggacgacctaaagaacgaaaaggaaaagattagagaggaagagaggggccatagaaggcgggaacgccggccgaaggcggcggacatggcggctctcaccgtcgcacggtgggaatggcgctccggcggcgaacctcgacggaggaggggtggacggggtggatctcggtcacgtgaactcgacggcggcgacggtgcggtgcggcggcgagcctagcggcggctagcggcggccgaagtggcgggaaaggcggcggcgggtggatgcacggtgcgggagcgatggagagcttgggagagttcggcgaaatggggaaaaagtgagagggggtggcgacggagcttaaatagggagagaaagggccagacgtggccgggagaggcgggaatcgccggccaacgtgggagaagtgggagaggagggagaggcgggattcgaaaatcgaatcccggccgtctcgggagcgcgggcgagcgggagagagggggaagtgggcgcgggaggcgcgggtgcgagggcgacgtggacggcgtggcccgggaggcgcggacgcgaggcacggcggcggttgcgggcgcggcggcgagcggctggaggttgggggaggacccgacaggtgggccccacctgtcggtgaccccgggagagagggggggcgcgggctgagctggggcgtgggctccggccggcccagcaaggcgtggggagagaggaggggaaatgggccggcggcccactaagggaaaaggaaaaagaaaaaagaaaaaggaagaaaggaatttccagggatttaaatattgcctgtgctcaattttaattgattaaaattatttctagggctctgaaaattccactaaaaatcctgttagtgaatttcgacatgtagaactgaagaaaaattccacatgtcagattcgattattatttgtattactttcttagggttttctcttgatttgcaccggcattttcttagggtcatttataaattaaattttaggcttgagaggagaacttcagggtgtgacaacgacctttgaacgaacgctgaacgaacgtgaacgaaacgtgcatgaacgtgaacaaacgtaacgaaacgttaacgaacgcgaacgaacgtgcacgaaacattaacgaacgcgaacgaacgtgaatgaaacggtaatgaacacgaacgagcgtgaacgaaacacttatgaacatgaatgaaacgcttacgaatgcgaacgagcgtgaacgaaacgattacgaaacgcgaacgaacgtgcacgaaacgcttatgaacgtgaatgcacttgtactaaaagtgtgagaacgaacgcgtttatactaatacattttactggtaatacatatatgattatatatgtaacttggcccgtttagactaatacattttcctggtaatgttgcagagaagacgtcgtcgtcgtccctcaagccgaattggtagctagccatcgaaggaattcgcgcaggcaagtgatgtaaagaagtgattgttagatatttaatataagattgttagacttagcatatatgattattacaattttaatataagattgttatcgatttaatataagtttgttagacttagcatatatgattgttagcgatttaatataagattgttagacttagcatatatatatatatatgattattacaattttaatataagattagtagcgatttaatatgagattagtagagatttaatataatattagtagcgatttaatataagattgttatacttagcatacatatatgattattacaattttaatatgagattagtagcgatttaatataagattgttagacttagcatatatgattattacaattttaatataagattattagagatttaatataagattgttagagatttaatataagattgttagatttagcatatatatatgattattacaattttaatatgagattagaagccatttaatataagattattagatatttaatataagattagcagagttttaatattacggttagcaaatacatcctatatacctaacaaatattttttgtatgcacagatggctgatcgcgatgaggaacagatatacaatcgcagagggaagcagccagtactagaacgaagaagaggggaacgacgatccaaactagtacttgaacgaggaggggaacgtggagagggatgcggaggggaacgaggaggggaacgatgaggaggaggctaatggaagtcatctctccgctggacagaagagggcacgcggacaacgaggtgccccgaagaagatagagggtcggcacatcataactgaggtggacgaagatggccgacctagtgccccggcagaagcagccaagaattttgtacgccacagcggttgggttgtgagggacaacgtgcctgtcagcacggtgtactggcacagaacaagggcacgtggggataatgacagctttgtctcggactcagagaaagagatgctgtggaccacaatgctcgagacgttcacgctacccgtgggtacggagaacatagtgaaacagtggactctgaagaaaatggcagaacagttccagagcttcaggggagatctctacaagaaatatatcctgaagggactaacaccgaacttcgacgtattcccaaagctaagggatcattgggacgagttcgttgcttacaagacagggcaacaagggcaagcgatgatggccagaaacaaagacaatgccgccaagaagaagtaccatcaccacttggggtcaggcggatatagcatcgcaatgccgaagtgggaggagatggaggcaagtttgattgagaggggtatcgaaccggccaccgctaaatggccggatcgatcgaagttttggtactatgctcacggtggaacgcttaacctagttgatggctcccttgtctttagcgatcaaatacgcgaggttgccagtcgactaacggacgcagtggtagcctcttcttagggcacattccgacccgacagagaaaaggatgagctgtcactcgccctacagactcccaagcatccaggacgaacacgagggaaaggcgtgattccttggaagattggatttaaggaggacatccacacgtacaggagtcggatgaggagcaagagagataccgaggtgaagattgcagatcttgagtacagggtgtcgagctacgagcttagcatgcaagaagaggtggcaaggaaggtggatgaacgtatggccgcacatcggtcccaggatccccatccgtacattcatcctgcaatggtcaccccatcaggcaatcatagcagctgcgcctcaatggggtaggtcggatcacagagcatggacgccatgcaaacccaggacgaaaccacctgccccgttgatgagatcacacagcagacaccttgtgagctgcatattcccttcaagaacttatcaatcaaggtatactcgtagtttgatgatttttgacttgtacattccgcaagttgctgcttaggttgattactaatagataacctctcatcacgtgaaggtggcgtcgggaatggccatcccaacgaacccttccaggacttaccactacaggccgattccagcaggatactcgagggtcgaagttgagctggtgaaagccgcgtacgacgacctcgagttggactacccaggaggagacggtgagacgcatctacgagacacaagccatgccatcatagtatggcgcaagcggtatatcatccttcctaggcgacaagcggcgtctcgtgcaccatctcctccggctcctccgccacctcctgctgcaccacctcctccggttcctccgccacgtcctcctgcaccatctcctccggctcctctgccacctcctgctgcaccatctcctccggctcctccggctcctccgcctccgcctgcacctcccaagacaaggtctcgccaagctccaccgcctgcccgtacaagggcaacgaagaaggcgaaagttgacgccaccaaaaacaaggagccaccatacgattgcagtcaagaggagcttgatgcttatgtggcaggagaggtgaagaggcaactcaagcctcggagtcctgaaaagaagatacctattgacccgagcgtgaagaacttcttcaagggaatgtccacaacaaacaaggaggcgttacagatattggactatgaccgaacacttcagagagcctatcacaagaagtccaaaccagtcgctcggcttggagaacaaccaaaccaagaggtcgagccgttgatgaccggcgaagattttggcataacggaattcatttcagacaccggtctaactgtggatcagttggttggaggcgcaccaatctcgcaggcggaagtggcatacaagtttgaactcagtaaaccgcttgtcaaacctgaacaactgcagtccctaccgacacagatgtacaaattccatgaacggtacatggaaatgagcgccgagggtagagagatgttcggagcgaggatcagaaaccccgacttcttgcaaggagaagatgttctctggatccatttcaaggatctcttcgatctgtactagttggatgccctcgacgtctctcttctgagcacatggattttgtgagtatctttgagttcaatttgtttcgttgaataattagctcctggcatatatgtatgcaataatactttcctttcatcgttgtagaatggagattcaaagggcctgacggcggagggtctacgatactgggttcatcgaccctccgaaaatcaacaccgaaatgatcgacaagtacgagaaagacacaaaggacaatctcacccatctcctaacgtagcagcatttcaagacgtacatactactaccgtacaacacagagtgagtttttattgtcgttcgaacaaatttcgttcccatacatatagcatgtacattttcgatcatatatatctcatctcacgcatattccagattccactgggtcttgttattcttcgacttggacgcatgcagagtcactgtgtacgactcaatgaataaagaggagaagatttttgacaaggtcttcaaactgatagacaagtaatataatgccatctattccaaagtcgcggggaatctattgctattatgttgatctcaggtaataattaattaatcatagcttacaactgcatatgtagggcttgggatcggttccgtcaattggtccgcgggacttggaaagaaaaacttggacggaggtttcatttttccagtgagtacatgcatgatccaaaattatattgaattgaatctctaattacagttaatataaagagtatattaaatctctcaccgtttctcatgtagtgtgcaaagtaggaccagagaactaacttatgcggctactacgtatgcgagtgtgcccactgcctatcaaaccaaatatgcacaacacgagagctcgatgtacgtatacataaaccattcaaaatttcattgcgtatcgatttgttaagttgtttattaatttcatatattgatacatcattatttttcgaacgatagcgtattcacatgagggataatctcctacacaaggattttatcacgactgttcaagaacaactgatgggattcatcaacgaagaagtccttaatcccgacggtgaattctactacgacggatcgacaattcataacgtcggtccttcctcttcggacataatgccggcgtcgaagtcgtagctatagctaccgagcaaatgaattgtactatatatacatgtatatatatatatatatttatatatgtacacatttacttttgtgttaatatatattttggtaacatatatatatatatatatatatatatatatatatatatatatatatatatatatataatcaaccatgcagcaaacagggccatgcaaataaaaaaaatggtgcaccgatctttagtcccggttatttcacccgggactaaagatagctatctttagtcccggattcgtagtcccggttggacaactgggactaaagggggttaccaaccgggactacaaacggtttctctaccagtgtaacacacagccacaaaatcaccatcatagaagatatccccggatccaatccttccagaactttcaagaaaaaaaagagagaaaaaataatccacacctcacaaaaaaaaaagaaaacgaaacccgataataataataaaaaagaaactaagaaacccctcaaaaccaagctgatgtgctgtgttgccaccaccacagtacaagaatgccacaaggataacagttctagcggtaattaaaataacaaagagttaaaacagcaacagaatcgccatcacaggagatattcccccccccccccgcccggatccatccttccagaattttcatcaagggaaaaaaagaagagaaaaacataatccatataaaccccaaaagaaatttaaatgaaaccggataataaaaaggaaactaaaaaaaaacacctaaaaaccaggcttgctgcgctgtgctgtgctgccaccgccactgtgtggtctacccgcctgggcagtgagagtgcatgagacgggccagtgggccccacgcccgccttgtattttcccgaaaactatatatacctccccgctccctcccctccgcctttccctttcctccccccacacccacccacccccacccccacccctcccctccccctcccaagccctagatgtcccccaccccctccgcgtcgccctcctccacgccccgcgccgccgcctccgcctccgccctgcccccgcgccgccgatccccccagatctcgcgccagccgccctccctggcctcccccgacgcccgattcgccggtcgcgcgccccgaatcggcgccgatttggggggattttggtgagctgttgtgagggggagggacctggccgtctaggtgagagggggaaacccccggcggtggatggatgccgtcgagctgcctcttccggccaaggtggatttcgggaagattttgactcccgctgcggtggaggggctcgagggagggggaggaggaggaggcggcggcggcgggggtggggatgttttgaggcgctgcgcagatgcggatcgacggcacggtggtataatctcttctttgatgcttatgttttgctcggttttgccatgtggtgtggtggactggatggtggaagctggaagaattgggtgtgatttgaaaatgtttatggggggagccagctttgacttgtccttggggtgataaatcgagtgaattctccccacgctcgatttggctcgatttgtggagtttagtagggatatgctatgacgagtgaattctccccaagctcgatttgtggattttagtggggatatgctatgacaatttattgcactagggaacaatttccattttccttttggagaggtggttttgctggttaggcgttacaagattttgtcgtttatgctcggtggcgatgcgtggcttggttttgtgcaaaaagtcttttggtcgtgtgttgatccccccgccggttcgctgattgcgtgctgcttcgacatgctttcccttgtcgtggttcagagagtgccacaaaaatgtgtgatgatgtgtttgctgtggaacgattaggaagaattttctgtaatgtttcaatagcttgagtgttggtgcatgggtgctcaccttctgtttcaaggcgcagggtttcttgttagcaggttattgaattgttatctgagaaactaagtggtagctagaacattctagcagggtattgaattgtgattcgagaagctaagtggatgtctctcgatgaggattgcaatgattttggtgttagggttgtcgacaatttgttccttgatgtgttatttgatgttcccagccattggtgatacgtaattgtctgtaatggttaatgtggggtgttccttgtcttactattttgcatgcggctctgtgtagtgctcctgttcctgtcaactcataccgatatattgacctacgtattgatttgtgaaatgattatcattgttctgatcttgtgcctttttcctttgttagagatgatttggtagctgtgatgacttagctactcgatgaatatgcatattctcttgttttcctctgagtattattcagtggtcagtggtgtaaccaagcagaacatatgcgatttactactattaggttatattttattttgttattagtgtataatatatcgagtccccgaatcctatttttaagagtttgccgaagtccgactcggacactgactcgtgtccgactcccggtaacactgcttgtgatgggaaacttggccacgcgaacatctactgtcacctgtataatcattattatgtttgtatgtttgattatttgagtagggatacaagaaatatgttcagtttgggattgtgatgtgaacaattcgaggcagtcatgggcacatggcttgtaactttggatgtgaaactatgaattggttctgtaggcatctccctgtatgtcatatgactaataaatgggccatggcttaacaaaagggtctggtacatagcagtttcatctgtcttatatttaattaaatgggccaaggccatttacatgatgacatgaacataccaggtatctgagagtgctcaagagcagtatatatgggacaatgccccacccgatgagcagtactttcatcggtcaattgattacatgtggaaagaaatttcgatccccatcctgaaatgaggaattcccttgcatggaagagggcattgtgccccatttccatccctagatagtactgtggctaaagaccagcgtgttttgttatccatgaaaatggatagttcctacttatcgctttgaactgatgtagtgacccacattgttcgaacaactatcattgtatctgtagaccacacattgggtatttgagttgcagcagttgcgtgaaagctgctttgttgttgtgtctgggaaatcttttgtttattatttctttaccctatgaatcattaaaacttcttgttactgaagtttgacatacttaccttgtgagtttaaattatttgaacgccttgaccatgttacctaaaaatttgatacgactttgctgtttggcctaagaaagagagttgaacctacaatacagaattgcagataaatctttctagaaatatgaacctttgttcttctgctagttgggggagttgcaaaagagaagtgaatttaccttgtgtttatgtggatttttgatttataagaagcattgcattggtgctgttaagcatgcaaacccactgcatgcatgcttaatcttcccaggtgtatgcagctattaactattcatctcttcagagcttggacattgcaacattgtttccttttccgtgtcaaaattaactgatatcctgtagactttaaacattcatgttaccttcaaagtaataaaaacaatttgtttgttccctggaaggttcataagatcctatattctttttttgccacgctttatctgtcaactggtttttgttatgtacattatttctttatttttgacaactgatttactaatcctcaaacgcatgtattggcagatgtgaagcagcacaatcagaatgtagatagcatttcatcctacagaattaaagggacttcttcagaagtccctatgcagaaatctcttgcccttggcatcaagtctgaaaacaatggtaagcgggattatattggaactgaaactggtcaagccttgcataagcaagatagcaaagtactgacgaaaaagaccataaagttggatgctccaccatgttcgaaaaggccaaagctagagccagtacaaatcactagagagactgaatcaaagagccatgatttcttgttgcagaaaaatgtgcctgaattgatgcaatgcacaccatccggtaagttatcatgttccattgaaattctctgtcaatagtttggagtggtattcccttctccttcacccaggcaattcaagtagcttcttaagttcatcttagtggggttggtcttcttaggagacattgagttatattctgactagcagatttgcaacaatgcttacaaatctctagcactgtcctatccaaatagcatattcatggggctcttatccattttcatcctttatagttcctttctaaatgttcatcatcctggccaatgtttccgttcccatattctaatgcgatagacaacttaccatgctctgaataaaccaaatcttatttatgttaatgcacgcactactgatctaaatccagtttagtatatgcatctggctagatctagtctactactaatattcttgttgctatagtattcaagtgattaaaatgtcctagaaaccatgttttgttatatgaccgacccttattggttctggtcaagtgcaaagcttttgatatattaattgtatgtacgcaccatgagggggattcgtgaatgttatgttatatatagctccatttgatggcccattttggatcacaacattctttttaccattttcctgacttggctttcataatccatgtttgatgtaattctacttttgtctgtgtggtcatttgtttagttactatagttccagtgcttctgttaacttctttgatattctgacaacaaatgcttttgctcttatcctaattgtacagaaaaatctcgtctgctgaagcagaagcgcatttatgatccaaagagaattgataagaagaattttaggtctggtgccaggtctaaatatgattgtttcacatcaagggccagtttaggaaattttgatccttgcttgggaaacaacacgcttggtatgtggtaactggttgtagctacactgtaattttgtttatttattcattctacctgttattattcctttattgtctatatttgctatgctgcactctctcacggcaaccagagtctattgattcattagagctcttatcaattaaaacctgtcaaacatcaattagttaaatatagaatcagatattcctgatctgagacagttattcttctaatatgtttacacacatatgaaatttcaaaaaatgattcgaagaaacatcaggacttcaacttgaatatttgcttatggtcttctcaggtgaaatggagttcattttcccttgaagcaattccccccttttttttgtttcatctacccttgaactttttctaaaaaacggtgcatattttccttcctgctgtgcttccttttatctgaagtcattgtttgtgctgtcaaacttctgacactcaatctttcacagaccattgtttctaattttgttctcgagtaaattgcactgatggtacattaacttgagagatgggtgcaatctagtgcatgaacttgtaaaacacccattctagtgtacgaacttacgtagtgcgtgcaaacaaaggccaaaatggtacagcactgagtaggacgccacacgtacgctcacagggcattgggcacgctatatttgaaaataactgtattggatttatgttttatctattctacacttctattcctacatttttttattttatagacatatttctatgcacagtaaaagtactttatggatggctgaacaagcatgcatcaacgtagcatcctaatcaatatccaagccagaaatatgtttataaaaagaaatataaaaaaagataaaagagaaatccaatacatatagttatttaaaaatataacatgtctaatgcccttgtcagtgtgcgcgcagcatcctaatcagcacccacctcagcaagattacccatgttgtaccgttttggcctttgtttgcacgcactacgcaagttcgtacaccggaacagacgttttacatgttcatatactagattacacccacctctcaagtttgtgtaccaccgaattctctttgttctctctctctccttactcttgatttccatttttattacgtatcaacttaccatgttgtcaactttgttttcttctatgtctgatattcattttggtgatctacgccccctttgtatttcttttgcatctctttagctgcacatactaatataataatacaccgcttccatatttaacaattttgtttaaagttgtagattgatggcctggctgtgacttttgcattataggacatctctcagtttcatctgattaagtaaccttaagaatgattgataatgtattttacaatgttaattccgcacgtatttttattttagtgtgcaatatttcacatcatcacatcacatggcatgtcagtgccatttgcgttgtaacaccacaacagtatctcttccaatttcgtctcaaatgaacaaccttcagagggagaaatatcataatgtaatggagaaaactgttcctcttagtacttttctgggtcatcaacaatatgaaatccatgtctgtttttgttgatccattttcttgcctggcacataacggtgtctgacctcttatttcagggactcatggtcttagatccgatatccgtgacatcacaaatcacattgagaacctctcattgagtgaacttctcaatggaacttacaaatattccagcttaggaagagaaaaaggaaagaaagttttgcgcacaaaagatgaacttctagtctctgtcagaaaagctttttccatgctatctggcagggacagttatagtaaggatcctaacttcctcctgagccctaaacttcctacagcaagcacgtccagctgtgatggcaaagaccaatgtactgacaaaccaatgaaggtaactgaaatgattaatgttttgatttgaatagtagtaatttatcatgttctcgtctttgactttaactgagtgtaactactcagggcccttcacaaatggaggtctgtgattccacaattcattgtccaaaagatatcctaaaccgtttaacacttccccaaggacaggatctagactctcttttatcacctggatgtgagagttctgctgcagttaagccttctttaccttccgtgacaactcatggagctagtttgccaccatttccttggtcgcactcacaagcgggagggtatcgaccaggtgctgactgtggtaaacatgggtcgagtaggagtaacacccaatggcagtgggtgagagttggaagcaatctcactgctctagatagtgaagatccgtctgtgcataaaattgatgatcttcttcaagaaatggatacggcaaaaacatctataatggattcgtatggcaaacaatctagtttatgctgcacggaatcaacttctggttcccttggacaaattattcaatcaagaaaaaagttgaatgggcataatccacagcaactattctccatggacaatgtagattcgtcagatagcttccagaagaatgataacgaatcttttcttctaagaacacctcaaggtatgcagttcatgaaggaaaaaagcttttaaccataccaatttccttttgataaactcaagcccttctgatcaatttcaattgtattaatctccatgagttcttgctatgagcttgtcaattgtattaagttcttgctatgagcttgctgttgacatgttatattggagaagcataaaagctttactggagtggtgcttctctgtcatacatcactctagcaaaacctaagaatgtgggatttttttattccttttttttttctttttgacactggagctagttgcatgtaggttttactatcaaccttaattactagtaattgcatgcttgatatacttagtttaattgttacaatttgatgataaattgctgatgtggagctttttatgagcagcatcaccaaaggtattgcaggctgctgagatcctatgtgacatgagaagcagcatggatgtttggagtccgcaggtattcagcaatgggacaatcaagtggccaaagtcaccttctgagaaggttatgaaggcccgcaagccttcatccccatttggtacagccgagagctcatctggatctcggaatagtgatgcagctcgtgccggaaataatcactccaccaagaaaatagttgataggaagaatgattctgtacgcatgaataaccctgggaaaggatctattaggtggcctgttcctattgaagatggcgcatctcctgtcaagtctgagagagggcttgtgcttgatatgaggcaaaaccatgtcaatgctgcaaggcatccgaatcaggtgtcatcgcaggcaaaggagtatgagaaccagcagaagctgaggaaagcaacattgacctcatctctaggatctgcaggagattggaatagggacaggaacaagagaatgtgaattgtacattattcccgttggaaaccatagtctgcgatatatattgtctgggggcagcctagccagacaactgttacataagaggtaacagaacattgggagatgcgataatttaggtggcgcatgatgtatttatcggggcatttgttggtacaattgttgtaacaattgtagttctttttatttgccatcttaccggaggtctctccctgtctcaccatcttcattgtgtattagtatgtctcgatctactttcagccaaagtaataatagcacgggtggttaattccattgagggaaatattcatgcaatatattgtctaattcaagtttatatgtttcatatgcattggctttcatggaaattatcggtcaaatcttgatcacctcaatgctgtagttatttgaagttgttggcagttgctgtggtgaatcttgagtagaaatatgtgaatcatcaagatctattcacattctctgttcaaggcttatccctttatctgcacaaaagggatctgtttatccaagtagaaagatctgtctgagttgtggatttattatttgggactcatctgcaggcatgttctgcatgtttggttatgcgcttatctgaattagggatgtaaaatgtttttttttcttatttcttttgccccactaaatagttaaatatggaaatttccaactgacggataatcgttccggaagaaatgatattgtttctgaccgttttcctccctttctgtacctgatgttgtttatccatgttccttgtgcatgcccattgtactgtattcataccgctctcatgcttacaatctgaaatgagtgtttgggaggtgaaggtgaccatgtacattctgatgaacttcataatttttctgattataaggacagaatttgtgtagtttcacttcatagttattctgtttaagaactgggaatttgtgtggtttcactttgtttacattacaagcatgtacagagacactgaaggggtgctaccaacaagccactgccttgatttcttaatagcaaattatttattctcatactattcacttacatgaccaaaccacttgctacttaccacaccttaatccgcttgtcctatcccatctacgctatgtttcactttgcctcgctctcctacctcttctccaacctctcttgcatttcatgcgctccaccacatggacaccgacgacgccgcgaagtctccctcgccgcgcctccgcgtcgcgctcctcgcctgcggcattgcgtccgccgccgtcgccgccgccgtcctgctcgccgtgacgctcaccgtcttccgcgtccgcgagcccgtcatgacgatgaacgccatctccgtcaagggcttcggcggcgcggcgccgggaggaggaggagggtcgtcgccgctgtggatgaccgtggtggcggacgtgtcggtgaggaacccgaacgcggcgtcgctgcggtacgcggggagcaagacggcggtgtactaccgcgcggcgagggtgggcggcgcgtcgggccctccaggaacggcgcgcgccaggcgcacggtgcggctgaacgtgacggttagcgtcgccgtcggggcgctcctgggggacccggggttcctcggcgacgtcgcggcgggcgccgtcgcggtgaccacggccacgacggtgcgcgggcgcgtggcggtgctcggcggcgtggtgcgccggcgcgtggtgctggagatgaactgcacggcgaccgtcgccgtcgccgacatgtccatccgcaaccagagctgcctgcagagagtgtggttgtgatgccgtgcactagttgatagtactccgtacgtgatagccacattggcatgaactccaccggccgattgtttgatgaattcgtacgtcgcggtaataagaccttgtttagatttaaacttttttcttcaaacttataattttttcgtcacatcaaatgttttgacacatgcatgtagtattaaatgtggatgaaaaaaacaattgcacggtttgcatataaatcgcgagataaatcttttgagcttaattatgccatgatttgacaatgtggtgttacagtaaatatttactaatgacggattaattaggattaatagattcatctcacagtttacaggcggaatctgtaatttgttttgttattagtctatatttaacacttcaaatgtgtgtcagtatacttaaaaaaaattggcacacaaagtaaacacacagacaagtgatgtgtttcatcgtcgtacttggtaaatttttatagggttttgtgaacataaatgcacttttcacataaattaagcgtctcaactttgatcgtctaattgttagcttatcagcgatttcaaagtaaaaaaccgtttctcaccggtttaccgcaatctgaccgaaaaccggtaaaaaccaacgactttcggtcaacgccgtacgaaaaccggtcgccggttttcataaaccgagacctagcggttttaaaaatccgatcggttttcacaaaattccattggttttctgaaccaaaattcattttttataacttaattttagagttattctagcatttgttttaaaccgcaaatgccaaaggtataattatcttaattttttgtttaatttttcacagctaatcggtcgtagcttaaactatttgggttttagcatggtcaagtgagttttttccaataatccgattacatagaatgcacatacacactattacacacgcacatatccacaaatatgctcttaacacacgctaaaaaaacgaactactacctccctctcaaaatgaatgtatttttatagttcaaattttgtctaaaaaattgtattttttgctaaggtggcacggaaccttccttttaatcaagattaaaatggtaattaagtgggcttattgtctcaatattccttttaattaagtgtatgtatggaatatgtgcatgcagtgtattcattgaattgggttatagcggtaaattgtgtttgttgttaatttgtctttaattccctaaaaatgtaattattctattacatatgcatgtatccatgagtatgctcccaaacacatactaaaataacgaagacaatcgtctaattccttgactatccatagactctttttagaaacatagtataaaaaaccgggatggcatatcatgatggagtattaacaaagtcatcgtgaatacttgcctaccaccaaaagaataactaatcataactgcaagcacatgtgtctagtctagaacttaaggttggttccatcacgagaaatctaaccatgtgagttacgctcactttacaatttctacacttgctaattttaatggacacaagaatgcaaactatgataggtggaatccacggctctatcgtcacaccttcgatgcttttcaaaggttagaaatttaacactgttctccaatccctctaaacatacattaaacgtgcaccgacgaatggacatgtcttctatataatcaggaagcggtctcaaagggaccatgaacttaatgagtggacacaaaaccatatcctctagcaagatatgccattaatcacctaacaatctttagctacaaaaagaaacacttttgtgccctgccaggtgccaaacgtgtgttagcttagctgggtaaccctaacacttaactactcctctaatcacccctctctgtctctctgtccaaccccaactcgccacgtgggcagtgtggcctcacaggaaaaaaaaaacacaagccgtagcagctaaggaagagaagagaagagaaagccaagcacacacaccaccagctttgctcccgctagttcccgctgatcgatcttttttcgggagggcgttgcttgctcggatcggcggccatggctgagcccgctggggaggcggccccgcaggcggacggcgtctcggaggaggcggcggcgaggccgagggggtttaggcttcttgggggggacaagtccgtgcaccaggctctcggcggtggtaaaggtaagtgtgaaattcgtgcgttttctttgtctcggggtgtagattgctcgtttagggcaggaattgtgtccggattgtgtgctgttcctctctgtgttaatcagtagggttcttgaggtggatataataattgcgtggctttgcctttgattatcgagctcttgagtagcgggtaggtaggtatacttcagttgagttgttggcgtttaggcctgattaaccaaattgatttggatgattatctaagaagcaaaattggctttgattctgaagaattctaagctgaattagcttctttcccatcctagaattaatggttatagttgtttgttcttcttgaaaagcacaagggccatgtgaactcctcaaacttttcttctgtgttggtggaaattaatcttcgttttgtttatgttgttatttaattccatgtacctgatcaatcatatactgctggttgaaacggagctagttatggtgttttaatcaaacggcgggattttcctcgcctgcagacagtatttgttcacaaaatcatcggagagggagtatattttgtggcttggttatccggtacagagttataccaataaccatctgaaagcttctagaaaacattaaaattaggcaaaccataataaattagggaaaccataagtgtatgaatatttaatcggcgtcatacggacaatttgtcttgtgttcataaacataagaatgttaagttaccaatcgttagctccttccaaactccagaagttctgttactttcataaaccaaatcatgaatcactagaaaatacaaatgaaaatggttttagcaatttggaatttttgagcaaagagttcaaaggggagaaattcattgtcctgttagatgtgtttcatgatggaggataggatgacaattgtgaattgtaggaaaggttagagagcatatcatgactctcttgaaaaaaagaaaagaaaaaagaaaaaaaaaagaagagaagggatagaccataccattgctccctgcaagagatagaccctaccatgtcatgatagatggaggctgctttgacaaaagaatcgtctaatgtgcatcccataaaggcatagatgatctttcatatgtaaagttgttcagagtagtattcaactaaccaaatgtcttctagtaactcagttgcattgcgtaggttatcatggttcctttcattatataaattcatcttgtctctatattcctctgtgcagctgctgatgtacttttgtggaaagacaagaagatctctgctgcagtgataggtggcgcaactgtgttgtgggttctctttgaagttgttgattaccatttcctcactctgatatctcatgtcctgatcggtgtactggccatcttgttcttatggtccaaggcaaccatcttcatcaagaagtgaggaacaaatattaagattcttatgtgattaatactgctctggtttattgatgacaaagtattctacttccaggagtccacctaatattccagaagtgaagatatctgaagatcttgctgtgaatgttgcactagcactgcgcactgacatcaaccaagcacttcacttgcttcgggagatttctctagggcatgacctgatgaagtttttaggcgtatatccctatttacagaatcaaatttgatttgatccacactgacaggttactacctcattcagcttgtctaagcttacattactaacatttcaggtgatcgttgctctctggattctttctgaaattggaagcctctgtgatttcctgaccctgttttacgttggtaatgattctttcagctccttaaactctcttgacttaattctttaaacttccaatgtagtttactaaacaaaagttttttttttccaaacagctgtcttgatgctccatacagtgccgatcttgtatcacaagtatcaggacaaggttgatcattttgctgggaaggcgcatgtggaactcagcaggcagtactctgttctcgacgcaaaggttctcagcaagatacctaggggtccagcaaaagataagaagcagaactagaaatgaaacaccatatcacgctggaacctgacttgggagtgttggcatctcacatcacaacatatgcatgaatcttgagtccttgacttggtttggcccttgttggtgcttggtacatatatgacctgtctgtagatttgtgtgttgggagtgtcttgtgtagtaaactgtcgatatgatgtggttggtgtgcaactctgcaatgttaatatacaagatcttgctgcaagcctgcaaccatatatgatatacgtacaaggactccatacctataatttacgttagtgtggttgtaatgtagatcgtgctcaagtaattgtaaagtgctgtggttctttcttatatcgctccaagtaattctcagttcttgttacttttagtttggttaattgtttccggttctcaaattctaggccctctacttaattttagcatgtcaattgactggctgctaaatttgctcaaatcttatcagctgctaatcttttgctgacgtcccctctcaattagctcgacccctcacagttgcaaaattaatttgagaccttttttcctttcaaaatttaccaacaagaaaataaccttcaaaaattagacagaggtgatacattttttaaaattaaatctcaacttcgaattcgatttgttttgtattctagatttattttagataacgggaagcatctatttcagatgtatgccgtcaaaaaaaacaaaaagaaaacgtagcacatgaagacttcctctgatcccaaatataaatcgttttagccttataaactttataaactttttaagttgttttatgacttctagacaatttctcaactactttttttttgcccttgataaataaatgatatatttctcacaaataaagtgatccgtatttcccaatgcaatataaataaatgttttttacttcttcaaactgaattctttcattgctatcaaaatttcacttatctgctttaccactgtttcgtctctactaaattctcctttgctattaccatcggtcaacattagttgaccaccatatttgcccaccaaaataccatcatgcccttatgttactaaaaattataagaaattatagaaatgcgtttgtgaaggttgcataaaaaaatatggcataaatttttttagttagcttggaatgtttctacatgcagcttaaatgaaattgaaatggaaaacagtttgctactcccaatactcaaaagaaattgaaatatccatgtgtatagttattcactgtaaattattttgtgaaattttagtatctttaaagtgaaaaaaatagtttaattaatgttttgtggtatctgttaaaattctagtgttattttcttttgaaacatttactaccgcataatggtgctttagaagcaaccttaacggtgaactaataatattgagcaaacaacggtggtgaaacaaaaatgcatactaacggaggaatggtaaaagagaaaagtgaatatatatatatatatatatatatatatatatatatatatatatatatatatacttcattttttacagcggaagagagaatacggttgcaacggatgctgaaaaaaaaaagggaaaccaagtctgattttcttcttgtgaaacggcccatatttgacatcacgtgttatatcatataacggcttatgtataaaagtacaaggcatactatttcttttgttctaaaacaaaggaggtattaacaaacttataccaatgaacaactatatttttggacatagaactaagtagtactctctccatcccaaaatataataacttctagcctttataatttgtctcaaaatataataacttcttcaccagcagtcttttcttaaccaatcataaccctccaccattcaatttttctacctaccctcacctctactccaatcgcaacactcctcccatttaattctaccaactttcttaataactatgtccaactctaaaaatacttatattttagaacagaaggagtaagatgtttgcttgaattttagtcaccagtttaatttaacacatataaattactacatccgttctagaatataatgaactttagagtggaacacggttattaagaaaatatgtataattaaatgaggaaatgttataattggatgagaagtataggtaaatgaggaaattgaatggtggagcgttgtaattggttagagaaaaaatattggtgaggaaattattacactttaagataaattctaaaatgttagtgttatattttgggacaaacaaagtaaaaaaaaagaccatctcattataaacaagaacacaaattcgtaacatctacttctaataagcacagttatggtccagaaagactgaaagagagagagagagaaaaaaggaaaaagaataatcccctttgtggacaagatagatacgaggtactattcagttccaacgatggatattcattgaagatacatcaaaaggatttggggttctccccttgtcgccggacgaattgaagctcgccgccgccgccgcccccgtccctgcctcaccttcttcctactccctctctcgctattccggcgaggggaggggatccgcctcggccgccgctcgatccgcacccgtacccgctaactcctccccaccccaccaaccgcgaccaaagaaggcgacccgacccgatattggtcattggtcttcctcctcctcccacccccgaccggcgtcgcctcggcctcgccgccgtcccctccacggagtttacgggtcaatcagatactcggaatttggatacaaagccaagcacgtatcaacaaccacttgccattgccccacacccacctcctcgcctgcttccccgtcttccccggcaatggcggccgcggctcaaggtactcgtatttcccggtgtctcaggcgagcgcggattgaggcattgcccgtccttctgactgaccccgatttttacggggcgccatttctttctgtttcttttagttcctataatctgaactctctctctctctctctctctctctctctctctctctctctctctctctctctctctctctctctctctctctctctctgcagcgacggtggcgccatcaatctcgtcagtagccaggcaacctcagcgattccctgcaccgagtactagtggtaagaatcgcgaatcggtgcttctcctcctccttttgtgcatgttgtaagtgctagaaatgggtgggttgtgcagttttgttcttccccaaaattgatagtacttgaaaagggggaaatgaacaacacatttgagatgttaagcccagggttacactgtatatttgcatgatatctatgataagcaatgggcaaaggttgtatcttgtaatgctacagtaacaaactaccttgtcgaatttcaagtaaactgtaccatacatgtgttctggggaaaaaaaaatttgtgcgcatactgtttattgtgcacaaaaaacagaagccccttgttatttcccttttaagtaactaacagtctctcgactacattcttggctcgtatcgaaaattatataagttgtacccatcaactgtactgtatatcgtggacaaaatcttgtgccatcactgtgccccttgtttttttcttaattaactaacaatctctcagctacattctcaccttcctcgtatgcagagattatataagttgtacttatttaactaatttgtatatcaagtatcaactgctataaaattctgtaaggtcagtacttttcattcacattatttaagatgctgacagacttggttttcttaatcagggaattcgaaatttcctctatttaaaacatcatgcttggcaatgagccatggccttgtatccaatactgctgtgtcttcacaaccaaatgatggagctgctaaactcatccagcctgtagtcaaaatgtgtggcatcacatcagctaaagatgcagaaacggctttggaggccggagctaaacttattggcatgatactctggccaaactccaagcgttctgttgcgttagcagaagcaaaagaaatatcaagagtagcacagtcttatggggctgaatcagttggtgtctttgtggatgatgatgaagagaccatcttacgagtgtctgattcatgtgaccttaatctagtgcaggtttgattaaactatgttatttctgttgtcatgcactacttcagttttttttttttttgcgctgtgcttattacttgcattatttcccctatgcagcttcatggagatgaatctcgttcattacttcatgtgctatcgaagaacaatcgcatcatttatgttctaaatgccaatgacgacggaaagcttatcaacgctcttcctgatgaaaaatatgagcttgattggttcttggtggatagtgccaaaggtggaaggtcagattttgctcttattgcttcttctatgggaagtagaaaaattgctcaagtgctgaaattctctgtttattccttaatatgagatcatgggatttgtaatgaatgctcaaaagagtaaaagttgactcaaataacctcttacatgtttgtgatataccaacttaaacatcagcaccttgtagcactatcatgtatatgctagtagttcttgagttcaatattctacttcagttctttatcttgcataatgcatacttactaaaagttcttggagtacatgctaatttacttgcatatttccctgctagaacaaatatatggctgacatctacatcttgctctatatgtttatagtggcaagggattcaactggcagaagtttcagatgccgtctgttcgaagcaagaatgggtggcttttagctggaggccttcacgctgataatgtttgtgatgccttttatgccctgaaaccaaatggagtggatgttagcagtggaatatgtgctcctgatggtatcagaaaagatcccacgaggatttcttctttcatgagaaatgttaaatccttgggcagatcacaatgattattctggtgtttggaggttaacctcattttgtttgcttaatgtggagaatgaagcagagtctcttctgaagcaagctgttcatttattcagcatggtagtggtaaatgccattggggttaaagtcgaaatagtgaccaaatttctgaggattttgctagtgatgcagtaactaataagtgcactctctgtgtctcaagtcgaaggcaaaataaattgcagagttgccatagttagagtttgatgtactatcaattgtatgttttgatcaatgcaataaggctagagtaattttcaccttttccattgggcttttcgttagttgcctatgtagaatacaacgcgtatgtttcttaatatactctggccggcatccttttgccggcccggcaaaaaaaaaaatatacaacgcgtatgcaagtacacgcaattacaataacagactttgcattatttgaattatttctctagtttttcatgctactggaaatttggatagcaacagaatccgttatattttcaattcatcaaactataatcaagttcctagaccagccaacaaagcataaccatgagcagcaaaaaccgccatgtagatgtggttcgcaaaactgaagagaaaatgcaggaaaaactttcttcaagctctcacacttagtcaggagcatgtgtatcctctgaaagaaagggttatccgaaaggattgcttcattggttgacattctgtgtattcaatggtatctgattaatatcggatggaagttggcgattcatgtcatatgtttcatagtagtaacagtgtcatcttgaggatccaataatctggaagttcgataacgttttcagacaaattacacggtgtgatattaaccaaaatcttttttttttcatacaaattacacggggtaatgttcaccaaaccgaagaacaaatcatcacagaaactagtactacagagccatgccaaatatttgaggaacgatcccgttaccagctttggtaaatgtgttctgaaatcaatactaacttcagcagattacaaaattaacgttacatatctaaaataccatcaccagatgcacagatacagttacaagaagccttcttcaacaatccctcaaattaagtgacagttgatctcatttaaacgatagcagcatcatattccaatggatcagactgggcatacttcatatgcttcttaaataaaagcccaaagaacacaatcagtggttgccctcaggaggttgtgcataggagaaaggagcctgtggaggtgctgctggaggtggagcagaaaccggaggtggagcaccagaagttgggcctgcaggttgcggtggatttgtttgatacatggctggaggtgccccactgttggggatgggggcccctggggctccagatgttggaggtggtagtgtcggaggccttgggagaggtgccatctgcataggcatagaaccaggtggcatagagccaggcggcatggaaccaggtggggcgcctgtttgtggcatggttggaacatttggagcaccaggataacctgaggagcgtacagagaagtcacataaataatatactcgttatttggtttgatcaagtgaaatggattaataagtggaaagaacatcagtccatgattagcgtgcattttctgtaagtgtatgcaatggcaaaatgataacattagcagtagcgttcctttggtaagtggtagctcatcttctgtggcactgcggaatgaattgaagtaccatgatagcactggatgtagagctcatctcaccatccatcatccactatctggtttatacaattccatgatgaaatataatttactaagctacagtgagtcaattaagctattctaaagaaataaattaaataagaagaagctcatagtttagttaagttgtaagataaaaatgatgcccatattttccaaaccatgtcaccagatcagtgaaagtggtttttatactcaaggcctctactttaataatagttgcacatatttaaaagttgaaggtcggctttatttttgttaactaatgtgtttcaaaactgcaactttggccacttattgctattctgatttttttttatcaaacacgatatgctatggaagtactttttgagacaaatctacacatggtaccccatgacccaatctaaatagctaaaacaatactaaatatcagatgatcaaatgcttagactaagaaaaaatacttttttttggataaactgtctatatttcaagaccttaaaaaatgagtacagaaaggtttgcatttatctataaactatgattggcggttaaaactcaataagagctcccttagtgtaacttggaggatcagaaattttattttgattaagaaagtattccttgagagtatccaagtcagttttactatggtcaaaatcatcaagtcatataattatggtctaacatgtggaaggcatatggttttgttcttaatctatactccttttaaagaaggcaatgctgctgcaggtgatcgaattcccacgtcatttcccctacactacagatgttacaaatcacactatgaagttcttcaatagtacacaatagacctttcacacattgttgtttttgtatttggccttcaaaaatacaaatttaatacagaaaagttacaagatgacttgaactgtcaaatatatgtggtatacatgttaatggtaaatactgtcaagtgatctttccaataagattgtgatgggtgtcttcattgcaaaattgaagtcacattctttcgtattgaacaacagcctattaagacatgtatgcttcattcttgtccatgtgatacattaacccaaataatgtagtgaacatagcctgaacatactgagcacccagaatgaagctatggaagagtttgttatcattattgctccacttaaatatgtatcgcattccttgttgaaatccaattggtagttttttagctccaatggaaggaatgaactatataagctatcaagatcaggaaagtacacaccacagaaaaaaaaaattcgccgggtcacaccacagaaattatatgccatataatttgaatgagaacttggttaatgatactgtaattatgagcaacaacgaaaatgagttctgttacctggaataccaggagctggcaaaataggaggcctaacgcctggcatcaaaggtgcaccaggtacttgaggaacaccaagtggcatgccaggtgttggcagaattggaagacgaggacgaggcacacctcctggaaatgagagaagatgttgattgaaaggagcaccaacttggaaagctgcagcttgtccaagatgttctttaattctttgatcaatcaagctttgagtttgctgctcctcaaattgttgatagtaggttcgaacatttgcctagaaatgttcacatgaaaagaaaaaggtcataacatctacgcagatgaatgagaaaaaaatagacaccaattacaaactggaattattaagatgaagagaattaagatagataccttatgtttgtacccagcattgtgctgtttacggacagatggctgcagcattttttttagaataagttaacagacatatcaactatacaaaaaaactatatatctagaacagaatgcaccacagaggcacatataattacaaaagaattggataatcgtcatgggatttatagagctttcaacactaatcacatacaattcatggtatttgacagtctcaaaagcaacaaaatgatctattgaaatttacagaagcaataagttgaaagttcgtaaatatttcactgcattgaagcatttttatcttaaaaatgatgttatgtagtttgcatatatctcactgcacattgcatatacgtaaataagtggccaccgagtgcttaattgtgtgtttatttaggctaagcaatccagggtaaactaatatccagttacacattaattatatgaagacaacattagttacagctattcacatgtacttggcacaaaattgattgaatggccatgatggtattcagtggcacaggaatatcttcagaaacaggcatgaatatactgtaacatcctcccagtaaaaaagaacatgtactgttgacagggaactgatctttaaccacttcagcaacagcattatacttggtaacgccaatcatgctatgattattttactgggcataatactatagaaacctaaaatcaaattaaagaactggctatctatagcagtgcaaagtggagggggagggggaggaggagaaactcacagagtcatgggtcaggtaggtgtcgcagtagtcgcaatagtacctgcaaaaagaaaaagttaaaacgagtaagagatagaacaattaaaacaagaataaacacgttgaaacggagcgccgaggatggcagcaacaagtagcagcagcgcaaaggctccccgcagtgggcaaaaaacggcagctctctcctcgacttctctaccgcaaatccccaaacccaaccatacacaatacgcaatccaccaacgcgatgtacgacctaaccacaagattcacggcgttctaagctagggtctcgaacccgaaggctcaaacatcgagctacgtatactatctagggttcgaaacaacagccttcccacccaccgccccccaccccccatgttaccttccgctgcgcccccaacaggaggagggacagagacacggatactcaccgaggcatcgcggcggatgatctcgtcggcgacggcgacggcgacggcgacgagagcggtagggatccctgccgcgagcggaatcggagcagacgaccgcggcaatggtgggggggaatttcgcgattcgctctagctcgattcgccctaaaaccctcgcgaattccagagcatttcgtgggccgggccggtcactgacattgtgagccctgtccattttaggcccacgcggcccgagaggagagtcataggaggagtccgagttgggcccaccgtcagtgtgaagcccttcgacgcttcactcccctttcgtcctcgtcgtcgccgtccgccgccgccgccgccgccggtggccggggatggcgagccgcgcgccgtgcctcctcgctgctcggggcatcgcctcgtcgcctcacctcgcccggaggttaaagcaaacaggtgatgcgtggggtggggtgaattttttcttatcattattattttttttgttctctttcaaattcaagaatgatgccgtctctctcctaagattacgttgtgagcgcggtggtaacctgtcgatgtgagtatgtagctcctggtggttgatttagattttgaatggtgtattaaggggatgggttgatttggatgtggttcggttagtggtaatggtgaagagcgtgtgaattatactagcgagatcgtattgtgagcttcttttgttttggatgcaacttattttggattccgggattgctatctgttaactgcgaagaacctagaggttcaaatcagctttggatggtctgttgagtgaaaaagaattcttcactgatgttgtttaatcatgaaatgggaatgcttgattatttgaatggttaagtcaatttcattttctagcagtagtaccagtaccagaatacatgagttccttcaaaatttgttctgaagtgaattgtgccccgcactgtttttgatcctgtatgtaacactatctgaaacgccatgctcaagctaattgcgttcttcttcttttgtttaaacaattttgacttgttggaatgcagaaaatgagattgttcaaatgttccgaaccccatctcctcggaacgaggatgcggtagcagctctttcgccaaggtacacaaattccgttcgtgtgttggatgagagattcattaggatcctgaaaatattcaagtggggccccgatgctgagagggcattggaggtactcatgctgagagttgatcactggttggtacgagaggttatgaaaacagatgttggggtcaatgtgaagatgcagttttttagatgggctgcaaagaaaaggaattatcaacatgacacatccacttacatggccttgatacattgtttagagctagtggagcagtatggtgaaatgtggaagatgatccaagaaatggtacggagtcctatttgtgttgtcaccccaatggagctttcacaggtaattcggatgctggggaatgccaagatgattggcaaggcaattacaatcttttaccaaatcaaggcacggaagtgtcaaccaactgctcaggcatataatagcatgataatcatgttaattcatgaggggcaatatgagaaagtgcatgaactttacaacgagatgagcaatgaaggccattgccacccagacactgtgacttatagtgcactcatttctgctttctgcaaactcggtcgccaggattcagcaattcgtctgttgaatgagatgaaggagaatggaatgcagccaactgctaagatatataccatgataatatctttgttcttcaaactggacaatgttcatggagcattgagtttgttcgaagagatgaggtacatgtactgccgacctgatgtgtttacttacaccgagttaatcaggggccttggtaaagctgggagaattgatgaagcatatcacttctaccatgaaatgcaacgagaagactgcaagccagacacagttgtcatgaataatatgataaatttcttaggcaaggctggtcgtttggatgatggtttgaagttatttgaggagatgggagtgtcacactgtattccaaatgtggtgacgtacaatactataataaaagcactttttgaatcaaaatcccgtgtttccgaggttttctcatggtttgagagaatgaagggaagtgggatctcccctagtccattcacgtactccattctgattgatggattctgcaaaaccaaccggatagaaaaggccatgatgctactagaggagatggatgagaagggcttccctccatgtccagcagcatattgcagtttgattgatgctcttggaaaggctaaacgttacgatcttgcatgtgagcttttccaggaactaaaagaaaattgtggttcctcaagtgctcgagtgtatgcagtgatgataaaacacttggggaaggctggccgtctggatgatgctataaatctttttgatgagatgagcaaacttggttgcactcctaatgtttatgcatacaatgctctcatgtctggattagcgagagcatgcatgctcgatgaagctcttactacaatgagaaaaatgcaagagcatggatgtcttcctgatattaactcatacaatatcatcttgaatggactggccaaaaccggggggcctcatcgtgcaatggagatgcttactaacatgaaaaattctacaataaaaccagatgctgtatcatataatactgttcttagtgcgttgagccatgctggcatgtttgaggaggcagctgagctgatgaaagagatgaatgcattgggatttgagtatgatcttattacatattcatctatacttgaggcaattggaaaggttgatcaagaataaactgaaaaattcactgaagaactggattctttgcttttgttcatgttcacaagaaaaaatcttgatccaaggcttcttttgcatcacaagttttactctagaatttcttctggctgatatacatcaaaagttatgcctccttgtctccttgagtgcaaatctggcaaaccattattggagaaatcttagaagacagacttagaaggtgtgtatttcattattttgagtatcttgcccttgatttcctatagtcagcttgtttactcatttataatgtgaatgattccattattgtgtaatggtgcaaagaatattagagttttcgctgaaagttccaaacatttaggtgtaaggttaactagtgtatattgagagttgtttcttcagcaaccactgttggaacatcgatgtgtatcatttaccaagttatggtcgtttcttttggacattctgggtatttttaagctgtaacacaatgcaaaatataaggattcagaaccaaaggatgagtagttgcgccgttatcatttatgtacaccccggtttagcgagcttataggatccccaatatactgtttattatagatctggtaggttgacaaccttttaatagtagttctgaccttattaacacattcttatcttttataggaacttactcaattttggacagtagtaagcttaccaaatcggcaatctggcactaccaatccaagagcaactgtgcggaacattctcagtccaagtgtccagatggggctttacatatggatggccattgcttcacaatgacggacctaggaattttctagagcttgtgcagaagcatgcgaaagcaatctacagtggagctatccaccggtggtgagcctcgcacagccttggatccaccctgtgcttcatggcaaagtacttctcgcttataaaactgtcatataattttggaagttcaaacattataacagcatcgaagcttgtttttctgaggaccaaagtcaagaatccagatgtggtggacatgtgctccatatatgttgttctaccttggtctcgaaatataagagaaccagatacttcttcaaaatcccttatattttggatagaggtaataaaaattatgtatagtggagatctgagatcctcaagagttaaggttcttgtcatgttgtatgatctgtttctcgctggccccctgtctgtgctcttttgtcattctatagaaagatatcattcttgtgaatgctgtcgctgttgcacctatagctcaactgtacatgataagggcatcatgtgtaaactatgatcttttttataaaaggtgaactgaatgtcatcacatgcaaatgtttatgtatctttctcaaaacatgatactagctggatcagctatttgaatatgaaagtaacgtgatagacttcctgaggaagtaaatgtgattcttctcgtcatttgtatgtgattttattcccctgatattgttcttgtcaagggtatttaagtccgtcttttatctttggtatcacacagctttcggttggtttctcatgtaatttatatctgttgacgttcaatccatatttacagtattaatctgaatcatgttactatatattttcatttttctgatgtaaaagttgctgtgtcagcttctcttcgctgaatgggaaatgaatcaccacttgataggaagacattaggataacttgcgtgtattacctggacaaggacaagactttcatcacctctaaaagatgcttcgtaatgcaagaaatgtatttacaaaggcttatatacctcaatgggaataataaagaactacatgcgtattagtgctattgtagaagggcataaatcttacctaccaatgtgaatagatacaacagaaagaatagccagcaaaaaaattggaccaaatcacactatttgattccatcaaaatccttgaacctgactgaaactttgtctgatgtcgatgagcttccaattataaccaaaaatttgtctccaaattggttggtgtcactgcaactgccgctgtttggagatctgcttaaggccagcttccaggtcttccaatgtgattgtgatcatagtattcgcatcgtcgcagttgaaatcaagacgtagatctagattctcacgggcattgatgagcagcgtgtctacaaggccaccattcatctgtttacgccgctgttcagttgtctccctggcaatcagctctccaacgacctcgatgctgcagcttgggtccagcttgaacccatacagcaaactgctctcagttgggttattcatcttcagatgtaagatctctgctaattctgttgtggtgaaatcgtcaaaataaaagaactttgtgaccctcctacagaagccgtcgttggaggcgatgacgcgcttcattggctcacagtatccagcaaatatcacaactatcttgccattgtccattacagacattatctcctccaaggcctccacaccgtaatccttatcatcagatttttgcatcggtatcaacctgtaagcttcatccacaaacagaattccaccctcagcatcctgtatctgtagaatgtatacacattatgatgtataagttaattaagtagagcaatgacaaatttaatcataataactccaaagtcaaatctacccatgtatttatccaatgtccctaaaacctactccctccgtcccaaaatatagcaacctaggaccggattagacacaatctagtactacgaatctggacaaagttactatattttgggatggagggagtatttatttccagatttaacaattttttttcttttccactttatctcaaattgataattgagaaaccaagtcttctgacaaaagcaagtatttgcaaaacataagaatccaaatactaaggaccagtgtaagaaataagtaatagtttgcataactagtaataacagataaatagttggagctttaatactccgatttccatttttaaggatagagtttgtatagtcacacgggaacaaaattcagaactcaattgaacagagaacatagctacctttcgcctagtttttggtccagtgtgccccacaaattctccaacaagatcagttcgctgtacttcagtaactttgtcggtagggagaaccccaaccatatgaagaagctttccaagaatccgagcaaccattgttttacctacattagaggttgcaatattatatagctggctttagcacctaaactacaaacacttgaatgatttgtatggccttgtttattgttttaaaacttgtttacccaagctttgggagaaatgctttcagcatgcatcaaagcaagaatcacatgcaagaagttcaccaagcatacatatttcttaattgtactgttccaataaaattcatcggtgcacaaaatagtaattatgaccgtaataccatgatgataaatcatgcttttgattatcaaactgaacataattgtggtacctgttcctggattgccaagaaatgccatatggggagcccttctgctagcaatccctaagcccatagctcgtcgtttctcatcaaaaagcattcccctggcccatctacgcaattgcattttgaggtcctgtaatcctacaatttgtgatattgcttcttcaaactccgccattgcttttccttcacggcatgacatgagggctttccgttttctttgctcttccatatggcgagtgaggagtttctgcagcttctcattaccagctcctccaggaatatgattcgaagggattttgccttcctggtggggcaatgtgtgatgagaacaagattcagtacactaaagttgttgtaaagaaagcaatttaccacaataagaatcaagtgtctatacatcgtcttttgcatagcaatccgcattgtagcttagcaacacgcttacggtgctacaatctccagattgaagtgcatgccagacagctaaatgcaatggtgccatgccattctgcaacaatgagttaaaacagattaaatatgaatacccacaaataatacgggatagaaagaaaagtaatactagatagacagatcctacatttgctttggcttctatatgtgcaccacgttcaagtagcaattttgctgattcacaagaactgtttttcacagccatgtgcaggggtgtctctccatactgcagaacaacagaagcagtaatttatatcttaagctcagagcatacaattagtgtcgcagaggtgccaataaggctgcaacaaatgccagatacttcaattaccatgttctttgcttccagctcaactttatccgtgccttggaaatcaagcaagaatttgactatgccagtgttattgtagccagctgcgacatgaagcggtgtttgggacatctgcatggtacattgtcaaagagaaggtaaggaacacaatattatgcagtacttcacaatattatgcatagcaattatgcactacaaaattctagtcagaaaacaaaaaaaaattaaggcctcagttgtttagaaactaatcaaattcatcatcgtgcaattcaggtctagccttcatgttatctctggcaggaatttggtgtgttgtgaactgagatatacgcaatatccttttactgatctatttgcaaattgtgcgcaaatcaagattgcagtggcagcaacattacaagatatccaaatcttatcagttcaccaaacataaacgtctaaatcatctcgaaatgcagagttacaaagtgtataagaaagcgaccaatctgagagaagtcgcaaaccatttcaaagaggaattagagaaacctacaattgcataaaactaaattccaccgaaagaaaaattgacagtttgaaaaccattgctgcaatagtctgaaattccacctaaagaagaaccgacgtcggaattaaacgaatctagaggaaattttgaaaactcttggcgagaaaagaaacttgcatccatatcacaaaccgagaaagaaacatcagagcaagcaggaggatggggagaaaaaatattcccccaaagaaagcaccacctcagcatcctaaataaggaacgaaatgggggaaaccgccaacatggggataaaaatccaagaaccaataaaaatccaagaaccaaagctcatggaaaccaagaagcaagcacaaaatccgatcaaaccaacattttttcttcacaacgaaagagaccccatctcttgcgaatctcgaatgctcactccagtccactccacactgcaaggagtgtcaaacgaaaccgcgcaagaagcaagcaaaagatcggaatttctttaaaaaaaactaaattaaatgaacaagaagcaaaagggggggggggagcaaggcgcgggcacgcacgacggggttccggtcgttgatgagggcgggattctcctgcagcttcctctggacgccggcgaggtcgccggcgcgggcgaggccgtggatggtctccgccttcgccggcctcggccgcccgttctggctccccggcaccggcatctcctccctctcctgctcccctccctgtgatagtgtgtgcgcgctcgctcgagcagcttgcgcgtgtgaaaaggaggaggagacgaggaagaaagggaggcgacggggggcgagccgacgggtaccaaatccctcctgctgtgctgtgcgctttaaaaattggatttttttttttgtttctggatttgttcttgttttggtttaattttagtttgtttctttggagctttatttttggcatctatcccggggttttctggctttgttcgttgtgaaaaaaaaatgaacattttttctcgttttctttccctgcttatcgcatgcaaaaaccaatgattgacactaattacaccatgatttggtaatgtggtgctatagtaaacatttgttaatgatggattaattaggtttaatagattcgtctcgcagtttacagatggaatctgtaatttgttttgttattagtctacgtttaatacttcaaatgtgtgtctatatacgtcaaaaaaatttactttcaggattatggataccacataactaatattagttgactaaatcttggcaggacccaccacataccatgtcttatacggaaacaaccttcagatataggagaagttccgtatgaggaagaatgaatagagttctacatggaaacgacgaggactacggtcgtagtgcagagagtattgttgatcctttgtacttcctccgccccctaatatcaaggattttgacattttgctttcactgtttgaccacttgtcttattcaaaaaatttatgcgaatataaaaaacgaaaagttatgcttaaagtactttggatagtaaagtaagtcaaaaaaatagataataattccaaaaaattttaaataagacgaatggtcaaatagtgtaagcaaaatatcaaaatctcttatattaggggatggagggagtaacattttaggtggcgtttctcccgatgaagatgaagattaagtttttttacgtaaaacgatgttgtattaacgtatgattgattatttttaactattgcaaacttgaaaaatagattaatatgatattttagagcaactttcatatagaaagtttttgcacaaaagtcaccatttagcagtttgaaaagcgtgccacgaaaatcttaatcttcatccaactcttgttggagaaaagaacgggaccttgaaagcacaagaatataacgaaaatacagaaaatcatggaacatgaagaaaatgatgttttaaatggcacgttgaaaaaaaaagtgaatatgaagaaataggaaaaatgaaaaaacacgttttgatttccacaaaattcctatggaatagattgttccgtatgctttcaggtatctttcatgagctaatcatttgtttcaaaaggacttgatattcattttatccatatgatttaaatcataatttacttttctttgttcataaggggaaaaataatcaagtgattcttaaacactccaatttttttatttgatgtactaaaatagtatcatccttccagttttatcgaattcaatcatttatcaagagtgcacaaaaagactatgtagcattacatgaacgagtaaatgtgccacaaaagggcaacaaaccaaacaaaaaggaaaggggaaaggagaaaaacatagaaaattaattataaaaattgttttttagcgcatctgcttacccaacatattttttggatgaatgtttttgtaacaaagattttcgaatgaaaattttcatatgaaagttttcctgatgaaagtcttcagaagttatcgaaaagacttttgatagaagttaatagtgcagtccttccaattttatcaaattcaaccatttatcaagagcacacaaaaggactaagtaagagacgagtaaatgtgccacaaaagggcaacaaaccaaacaaaaaggaaagggaaaaggagaaaaaaaagaaaattaattataaaaattccttttgttttttggatgaatgttttcgtaacaaagattttcgaatgaaaattttcatatgaaagttttccggatggaagtcttcggaagctatcgaaaagacttttgatagaagttaatagtgtagctacatttaaaagttttccacctaaatacttacaatagttttttagtagtcctaatttagaattacttgtacaaaaatatagttttaacttttatccgatataattaagaatttgtttattgtaaatgggttatatccaatgtgttttatttgataacaatatatttgaggccatcaacctagcttgctgacagactcttattccagagatggacgacatgatttgtgtgacatacttgcatcaagaagaggactaatcgatcttactttgcatctatgatttgaagaagccaagcatttgatttcttagcaaaagaaccattgttacagagcacctcacacgtttacgtcgatatgctaaaagaaaattatattatgttggtaacataggatcattttgtagttatgccatataaaaatattgttagtgtaaaaacttattcaaataacttatctaactaccaaatttggtatagttgaactaaaagctaaatattgaaggcgtgaggaaaaacttacatgaaactaaacacctgtatgttactaatagtatttctattttgagtctgattaagatacaaatttcgtttttttaagttgtcaattggtgtgtttcgtgcgaaaacattcttccgtacaagttaatattaaatctattttcgaagtttgaaataattaaaacttaattaattatgtgctaatgaatatttcgttttgcgtgtctgtactcgagacatctatagcttctcccaattatttgtattttgtaaacgcaataatacaatgcaatttgttattcttccgagtctgatttagggcttgttcattttatagccattttcaatctttccaaaatttggtattgccaaaatcttagcaagttagcaacattactaagttttggtaggataggttaaatatattattgtcaattctctaagtatgacaaatatttgataataaactaaatattatcatgcatttgttaattttatcaaataatggtatggtttaaaatatcataaatctgaacgtgcccttaaaagtaatcagtttttcaaggacaaaatcacatatcaaaacctctagtactagtaccaaacaagaccagcacaataatgtaattgtacagccagcataatttagcttgaggatagcgtagatctacgcataagattggattaattttgggctagcatagctacattgaggcaatgtttctttcagtttaggattattataatctaaattattgagtcagattactataagctataagctagattgttataatctatagtagaataagcggttagttgtttcttttctagattattagatcctagattattggatttgcaagtctacaatgggagtggggtggcatggtgggtaatttttacccaataatctgaaaaaagccaataagctacttcaataagttgtctgttattttttagcttactactaataatctaaattataataatcccaagcttaaataaataggacattttcagcttactactaataatctaaattataataatcctaagcttaaataaatagggaaataaatagagcctgactcatctggacccgcccccgtacggaccccagtccccaagtgatgcaggcagcaggctgtctgtcggccagcacgtgggaagccggctcccccgcgcccgcgtcggctcgcacgcgtgagtgcgtgacgcatcagctgttccgcatctcgctcgctcactgccagtgccagctccccgccgccgcatcgcatcgaatgccagcggtgttacgtcttacgtgttcagagagagtgattttacactgttcaattattagtatagatttacatgtcatttaaataataaaaaaaataaaaaaagagacgatggatattttcatatcactcgaatattatattttctaaaggaaatgagacgatggatttacataagttaaaattcaatttctacgggattaaaaccaaattaaattatactaactagttaacatatatttatagttaaaaatgtttattccgttgtaatatgtataagttaaatttgaccttgcatatttacgaagtgatcaatcacatattaatcttatctcgttgatttttttgattttttcataacttatttaaatgatatgcaagtgcaaatcataaggcgcagtaacaatgcaagctacgctatgcgtgtctcttgcccatgcaaagcatgttacctcttttgtgtggccttaattggggtgaggtactatcgaagccacaaagcccacaatactggtgaccaaagcaaggaaagtagcccacggaattaattcccccaactaatctcgacgagtctctcttggacgcatcgcatccctcaacctgtcgcctccaggtccactacacgcctcccaatccaccacggcgcatcgctgaccaccatattccgccgcgaagagttcacggcgatggagctctggagcgaactggtgctgcttctaattggatataccccatctaggccgacaagagtgagggcatgaaaaagaggggcaagaaggtgatggtagtcgtcaaatccttgcactgagagatcagacttgtcaattgagatgtggaccgaacctagggtctaggatgtggctgacattgatgttctagctcgtccacttccaaccccgttaactgtggaacaggatgtgatggcggatgcggtgctggcttcagctccacctgtagcagaggcttcttgaactcctccaacaaccaagtcaactcaggtaatggatctcaatcctaggtttttgtaaatttgggtgtcctttggatatgaatcatacgaagttgtgctcttgatttaatggcatgaatcggtgggcacgtgagagcgattttagggattccatcttcggtgtggcgtgaggggaaaacgactcggagccatgccctccacagcgcaggcgcgatgtgttttctcagccgtgagtggactcacaaagggcaaagaacgtgtctctctgtgtgggggaaagaggctcaacagaggcgcgcatttagtcgacacataagtgaatatccgagctggcaatacgaagtaacttaccgcatcctcgcatggtaaaggcctaaagggcctaggggcacatcctctccgagagttttcaatagttttccccattttctccatgcttgggcggttgggcctccatttttcctctctccgttggcttacgcctcctattaatgggcctaatatcggcccatttcatgggtcggcccgtgcatcggtgcatgccacctcaggcccattcgctctaagaaaaaggccctaaagtctaaaaccctacgcgtccgttatcccaatcccctcgattctccggcgactccggcgatgatgccgctcctcctcctcctcctccccgtccgctccgcccctctccggcgcctcctcctatgccgctgctcctcctcctcctcccccgccgccgccgcctcggcctcgtcatccgcgtgccccgtccccgcctcctcagtcctcgccccgtaccaccgcgccttcgcccgccgcatggccctcgccggcgtccacccgcaccaccgcgtcggtacgaatgcggcgtcgctttattggttttcttgctgaacgagtggctctgaggtatggttggttggctggtttgcagcggtgggggtctccggcgggccggactccatggcgctctgcgtgctcgcggcggcgtggaagaaggccggggaggggagggagcaggaggatgagggagagggcggcgtctcgggattcgtggacgggctcctgggggtcgtcgtcgaccatggcctgcgccctgagagcgccgacgaggcgcagctagtccgtgatcgggtgcgcggcatgggtaaatcttacttatggattaacactgtataatttctttattttaacacaaatttactctgcacctgcgcacatagaaaattgcaatgatgattggcttccgttaggtctgctccttgagttgcatttgaatgggaccttttcttttgaactgttttttttaatgcgacttgatccacaaaatagacattttgaggtgccacaattttgttgtaggtgttgtttgtgagattgctacatgtgaatggccgaatgggcgaccaaagctggggcatattcaagaagctgcccgtgaaatgaggtgtgcgtctccctctgccatggttcactacttgtcaaggataatgctatctgaacaatttgattttctgcaaacttagtatttgtggttgatatggccaattttttttatgtctcatcgatttccaaaacttacatgcatgctgtatggatatctgaaaaaaaatgtacctcacctactaacaactttgtatgaaatttgtgtagaccatttacttgcacaaagtgttaggagttaaggggctttcccttctctttaccggcacttaaggcattagatttagttgtttgttatacttaagagggcacatatgttagtattttgaactgtgggttgtgtaggcgtgtgttgtatggctttatttgccacttctcttatatgaaatgatacatagctctccggcatgttcaagaagaaaaataatgaatattttgttttgtttagttaaaactctgaaccttacatgttggtattagtgcattattctcacaatatattggcgctgagggtatcaggaatgttctttaggattcttcatggacattacctcctgcacaatgtgcattttttttttcaatttccagtgttgagaagctgtaaacttgccacttcaaaagtaaagagtgacatggttcacactgactactaaaatatatggaaatttagtatgctatggcattgtgaaaatgaatgctatgttcttcatgactgtatatatctacctgatatatgctctgccagttccataccaatttattcacaaacacagaaataccttagtgcattttaacaagacttcacattttaataaattcaggtaccaaaaactgttggacatttgtataaagcaacgaatagcagtcttgcttatcgcacaccactctgatgaccaggtctgttaaattgagagatgtatttttcctttttcccttggttttgaatgagtgttgccccacttatggaattgtgagttaacacataaaatccttgttatgtaaaagcattgagccaaatgacacctgttatcatcgtcaaataagcggtgctaatttttttctcttatattttaagtttttgtggacttgacaacttgcatatagggaactattattagatatgatactattgtgccttcatgtattactgtatctttgtttgtgcatttactctctaggctaacatacattgtcacatgaatatctgatatcggatttagtggaccttgcactgatccttgaatttagacatggttaccttctaattgtcgtagtatccaatgtggtattgaattaaagattactgaatctaatgtatactgacatctttctaccattctatgttatgattttatgccattatagttactgcagatgcagattatatgttttctctgagtgaatttaggcttataaatgcaggccgaactctttgttctgagactatctcgcaacagtggtgttttggggcttgctggtacagcctttgtatctcagttgtttgcgcctaatctaaaatatgatggagataacttcagtcgttatggtgttattcttgtccgtcccatgcttgaattttcaaaagatgacatgtataaggtaaatcatgatctcatgatatttagaatcagccttgcattttacttgaggagccttatcttacttttatctttcaaatatagtcaatatttcatcattagacacttaatttgaattttgatttcccaaaattcatttaacatgctgtatttaatgagttcagcttatgtatgtttctagaaattcctcaccaatattcctaatttctcctgctgactagcctttctctgaaaaagcaacatagccttttcttgtaggagactttgatgactttgctttgagctgtcatttttttttaaaaaaaatgatcatatttgtgtagctgttactgattgatctgtcatacttggttctccacagatatgtcaaggaagtaatcatttgtgggttgaagatccaactaataatagtttgctgtacgttaggaatcgaatccgggcatctttgagaagtttatccatagaaggttcacaattgcacttaagctgttgcttttgagtgattttagaatcatcatgttgaatcctttgtcttcaactttacctcatttatatcataatatagatcattcacagatgatgattgatgaaaggtgatgtccataaacatttgacaaatgtataaagcttgattgagcatgcgtacgttttactcattataaatttcaatgaattttccatcactattaattatcaaatgccatgtttggtcacaggaacaacttgttctattgaccatccgcaattgggtaattctgttgaataataactgactattgactgtagatacaccatcttctggaatcagcataaatgtttgcttgtgtgcaccaaattgtgatttttcatgtttcttgtctaggttggtctgtacacaaggtctatttattttatagtaaataaaaagtgtgtcagactatcagtggcccagaattcatgggtatctagctcaagagattgtatttagttaaattcacttgtggaagtaggtcacagaatttgtagcaaatgacaacattttcactgtttcacatgttgccaattcgtggccgaagttatttgtggcaagtcctagctccaattggtatgtgtgaagctacatcagctctggccagcttgtctgcagttgtaaatttgcaaacgctatcaccttatgatgagcgatgaacgaatgcacattcagctgacaaattttgcttatctacaggtacctttcagtcagagcttcacaaactgatctatgcgtgccggttgacacgagcatttatagataatgcctgcagtatggttttaaagaagtctttaacaataatggaggtataccctttttctgtaattcgatgtctcctatatcatgccattactaaaatttatatactaactcttttcccccgtaaaattcatttatcattctgcagcatggatatgctgtcattgacctggaaaaacttgacccacataacgttgatgatctttttctttcacgatatttagcatatgtattacaggtacgtcttttgggagaaaaaaatattctgaagtttgaagatcttagacaccttattgccacgggacattgattcatttttttctccattgtagtttgtttcacaaaggcataggccactccgtggtagatctgctcaattgctcatagactacatccgtaccatcccctgcaaggttccttctagttgatgtgcatgtgtactgcttacatccttaagtttttatttctcttgtgtgtaatttttttggtaaatattactgttgttgattggaagcccaatcaacttgaaatgaaaacaagccctaaggacctgttcaaagttcacccaagtctggtccaaagtctgaattgaaaattaatatggacattttatacttcctttccagatcaaagatgcttacatatacatacatatatttttctatgcttgaaataagtcattgatctctcttagattcatcgacatagccatctgatgatgacgatagcgaactagtaattcttacgtagcacataggcacaattgcaatctgagtttactattattttgtgcagaaaaagattttcttgtacgtgttgggttatctcatttgctgaactgtacgatagcatttcatgtgctaacttatggattaccaaatcctggtctagcaccaaataaagattactcattggttcccccaaaacatgggttaagaatcgacctatggagggtgggccctaggggcctcaaatcacgggttaaggcctgatctgtagggggcgactccttgtgtaggggggaccgtctattgtgacctttctcggcccctgttgatcagcgtataacgttgctgcaccgagaccaagaaaccaaatcaactctgcatgcacatcatttatagctaattctccctaattagcatgcagctcaacggatttattctgcatgcatctcaacgcatgagacttcaaaagactctgcatgtacatgcatagcatgcgaggcatttactacaacctgagaaaacgctagtacctagtttatacgctgatcaatttggaatatttgaaatttggttaggcgctgatcaaaagggaatggagggagtataatacattagggaggtctttccctttggggccgagttctttctcatctttttattattattattatattagaaccatagaaaatactgttatatattaagaaggtttgtgaaaatattgttgaagtatttggagatgggtacctgagatctccaaagaataatgacacagctagattacttgccattgcagagcaagggggttttctcggaatgctttggtgcattgattgtatcacatattaataattggaggatagggggagatagaataaatgaatcattgatacaatcaatgctccctagcattcctggaaaacctctctactctccaattggaagtaatctatctatgccattatcatttggagatctcaagtactcatctccgaatacttcaacaatagttttcattcacaaacattttaagcttatgacagtattttctccaatttcaatattgattatccatagcatctcttggtactacataagttcgcattcaaaagctgctgtacacttgtgcaaaagatataacccaagacctccaacaatatatctttttttgcataagatactcatcatgttcttctacagcacatgctatgttaatactcatcatgatctctctataggaaaagtactattgggtaattctgtactttagcaaaataagatccttcatggttcattcagttctgcttgaatctcatgcaggctgccctgagtgtagctggttgttacctttgtgcagttccaaggtccaaaggtacaaaagtacttgtctgttgttctgttgatctgatggagtcatcttctgttcatatgtcctataagtgttcctatgtaaagcaaccaccaccagtatccgagatcaaccagatagtcactgaagcacgcatatactctgatcaatttcgacagaactgcccaaacacaccttttccgagctctaaattttcaactgatgtgctgaataaggcaaaggatctcaagctaataggtgattgtacattagaaaagctcaattatttgcaaacagatgaacaccaaaaattcattacaacaaaagagcatggacaagaacagtacttggagaaaacaagctttccttatttagaagttctaaatctctggcctggtgaaacatgccactttatgggcaggttcttgattacatggagaacctcggaggttgttgtgaatggaatgtgcttgcatgacagtcaaaagcatacttgccagtattgtatggtaaatcaggatggaagtcttgctattaggcatatgttcgataccgattggttgttccttgctgaagtttgtaagatccattctttggaagagaataagaattattcaaatgctctctgtgacaagttggaggatgctaaactcgtgcagcactctagatatttgcaattgtcagcaatgaaatctcttcaaatcctgagatctattccagcacctgcaagacgaatgctaccagtgttgaccaactcgcaaggtgctgtattgagtataccggtaaggattccactcaaaagacattattttgttttcattttgtaattttaatatgttctatttttttaagtacttcattaatccgatgcattgtttttttaaatcaaacgtgagctaccgaaagctaggtagtggtgaactactccaaaccttctaattgcatgaggttagcacagcatgaagcacacatgacctagctgcccttgcatgcatgccttttatttgttagctaactatggaaaacagctgaatatcaaagttggcactttgatatcgatttactataatatggtgagtatgcgaaactccaagagcagtactggccatgcgtggcatagttctcaattctcaaatattgaaaatagtaaaacctgtttttggacctggcaactgattaggaggtctgacttcctagtgattagccaattgcttcagtctgtcacaatttttaacgggttcagtaccaactgaaacagcaggtgactaggaaataggaatatcgtgcagccagtgacttggcttggaacagtgacaaactgaagttgttcataacatggagtagaagtcctaggtagaagtctataaaccatctggttatcttgaaaattgaccagagaattttcatgttgatttcttttctgtccaaaaccatactgtcattctattactacatgtagttactgaatgcacagttttctataagatcaaaggcttcatgattcaggtggcaaagaaaatttacagatatgaagttctgggagatattatatgtagtctttctggaacttgcatattttggtttgacatactcctagcatcgtttatcagatatttgaaggcatgtagacagtgaatgcatttattccttcagagaaaggctttactcctattgtgctaatattctctcttttttcccttcttgttaagagtattggcttccgatgttgcccaagcctattaattgaagcagtattcagtccaagagtaccacttggtggaggatacacttcatatttgtaagtggttgatatctattgatgacaaaacatgaaacatcaagtgtataactgctgttgagatgtaagcagccgctggtaatacaaaacatctgatcaatcttctccctcagtcaatcattatatgcgagctgctaatgatatatactagtatcatgtttgtcccgtataactatttcaggtgctgaatcgcttgcaacaaaccgtccaatcattgccaaatgcgaaacagccttagcttgccaacgtcgttgtgcagttaactgatgtttcgtgatccctggttcatacatatgatgatttgacaagcttgacaagaacgggatttttacacgacatttgcggatttgccagtttgcagggataaatcactacaacagttatatgccagaacaggcccgattctgcactggtttccatctcaacacctgtcgttggacatcagggtgatcatggctgaaatctcgtagcttcgctttgcagtgccaaccaggtgtcgctgaggcaatagcaacttttggcactaggcaagtggaaatgaaggtaccactagatcactgtgagagcaattttgtcagcgctggaggtggctcaagtgcctaatcgttaagaattttaaataggaggatagataaatatatcaagtacctgagcgctggaggtggctcaagtgagatttacctccccaagaatgcatcgcctagcagactcccggttggacatcagcctgtaatttgaagccaagaatcgtttcatgtgaattattcgtcagacattcttactagaaaagcaatgcttaactctacttacgaatacgataacagtgttcaagcagtgacagacaaaacactgtaaatgattgttcatgtcttggtatgtatgccttctcattctcttcacatccaatgggttcgtgctttgttcgcacggacaggacataccaccctccatatccaacagcgattcgctgtcagaatccgaaccacttgtgccttccagagtttggttcatattcagattggtagctgatgtgggacttgctgctgcagctgatcacagcatatgaacagagtagtgagcaagaacagctaaacatctgaacattgtgccccatcattagatgcagttttgatgcagcacataacacattaataactactgtccatgtatgtccattgctggaatctccatgtgctgaaacatcccaagttgacaacgtagaaactcctgttaggctgttaaccagaaaaatgatttctcatcttcccatgcttagaattcagggttccctcttaccaggcaattcgaataaaattcctctaaaacatgaaataacgttcgtttgtagactaaaattgtgcgagaaaaaaatatactactagtcactatgaaaaagttactgtagtagcaaaaaattggtagaggttgaaacagtcttctacttgaaaggtagcaggaggcaggagctgatcagtagcagtaaatgaaatttgaagacatgaaattgcagtcaattatatatggaccgtgctactacaagctacttccggtaaaactatgaagattaagttgacacatgtaaaacgagaaagatattaatatatgattaattaagttttaattattacaaatttaagaaataaatatatatttaatattttaaagcaaacttgatatagaaaatttttacacgaaacacatcattagtagtttgaaaatcatactagcagaaaccgaggtgaaatgtaaatcttaattagaaaagaacagttaataacgttaaaagtaatgatatttcacttgtgagcgagggcttccacttattctacacctctcaaatcatcttatgaagtcggtttaaagtcaagctcaaagttttcttttcctgctgattctgtcaagcccattccttagctgtggtttcctttctttttttttttctaatttaattgagaaaaaaagtctcatctttaattttggctactcaccaaaggaaaggagaaaaagaagagggggaagctgttttggtccatccaaacgccccaaaagcctcccccaccgccccacgtctctccttgcccctccttcccctccgtatttgcaacactgccattccgtttcgttcaaaatctgactcaagccctcgtccacgtctagtactgcagcggggagtatttcggggaaacttgggcgctgctagtttagggcatatttgggttgaggagcttcagctgctgtaacttcttctaaaatcagaagctctccaaaatagtccagcttttgatctagattctaaacctatagtggtataatctaaaaaataaactaaaaattaaaagctgaaaaaccttttttagattcttataagctagctaccaaaccaactgtcttgagcaacagacccttgggagttgattcggatccgcaccacgcaccgacctcccgcgacatgacggcgcaacacgttggctgccgcgcgatgtcctgcatgcgctctgacacgtggggtccaccgagcgggggcccatctaggggtgggacctagcaaggcgcatccttggtggagactggagagccgtggagtctctgcctgtgtgcacgggaggcgggctacgtgtcagcttggcgggatcttctggggcatgccggcatgtggccggccacaggttttgcacgatgagtggtggtgaatggacacgaggggagagatgatgtacatgtataagagcaaggtaaatattatagcagctgatggttttaattagtgttcatgttatttatagtagacactatagttaatatgtacgataaagaaattttatgttaactgcgatattttattattttcgtgggtcccacaatcttcttctatctcttctctttctttcttttttccagcttctcttcctttctttaccttctctttgtttcttttgcctgcaacgaggcttggaggctggtgaccgcggcggacgcatacgatggcgggcgcaggagacggtaacagcgacggccatggcggacaaggcggacgcaaactgcgacgacggcgaactcaggcgatgacagcggccacgatagctacaacggacgaggcggatgcacgcgacgatgactgctgcggtggatgatggcggacgcaagcgacggaaacatatgcagtggaccagggtgccggccatggcggactacaatggataggcgacaacaccgatgacgacggctgcggaggatggggccgaagttcgcggcagatgccgaaaccgacgccgacgatgaggcggacgtcggcggtgacgccggctgtggcggacgctggcgatgacgccggccgccgcgaacaaggcggacgtacggtggacgacggtgatgggtgcggcggcgattgcgatggacatagtcacggaccatcgctacaagcgggccccacaaccttgggccgcgcgtggagcctcgcgctcgcgctccaccgctctctcctccatgaaatcgcaaaatcctagctggagcgtttatcgccggttattgtaccgctcttaaaattttttactccctccgtaaaaaaaagtatgggacactgttaatttataatataaaataaaaggagtatttataataagttttcgatgttttgggtaaacaacatcatataattttaagatgtagataatactttattataaaaaaaaatcggacaattttacgatggaggtagtactctattactcttcggacatagacaacgggatccgatcaccggcggctggttgcgaattcagtcgcggtgtggtgggtagcgcagagaatccaagggaggggaggtgtccacgtcgggtgatgcactccggccaagttggcatgatttgtccttgtccgctagctatgtcactccccaccaccttctcaccaaactccttttcatctttgttgccccttgtttacagcaaattaatttacctatgtttagcaaatctgtggcgacggcgcagtgcagaggccggtgtcttggccattcacaaatcacaattacttgaagcacaaagaaaccacactaaattatcgcctttaattgttcagaaacgtagtattcactccagagtaaaattcatttaccatatcccctatcagatgaaaacttttggaccgtttggtcacttacctgaattctccaggctctcaccaagtggatcatggattcagaaggcaactgcaataaaatcagagaaaagctctaacctccacaacatttatacttcgtagtttttcagtctcttaccaaatactgtgtactatatatagctagtcagttctattacaggacgacacttgacacgacacgaggactctgaaaaactcaagtccgttcacttgggacatcacatttttatacgtagctgagctgacaaagcagtaagaagtagttttcacttggacatggcgccattggagtggttgtcccagccccaggcgtcacccacctcgccaccgccgggcatctgcacctgctccggcggggacagcccggtgaaggggtcgtcgccggcgtagtccagcccggtgagcacgtcggggacgcggcacgccccctgccgggggttcagcgccggcgacagcccgcccaggtggccgaggccgcacgacagcgccccccgcgccaccatgtcctccgccatcttcacctgtacaaaactcggggacagcttcagagttcagaaacagccgaaatgcgtgatgccgatgtgatgatgatcaaataataatgcaatgcagtgtgcagagatgaaatgcatgatcaccttgacccggagggcctccacgtctgatttgaggattctgttgtccgtgaccgccgtcgtgaattgctgattggcatctgtcaactgcttgaaaagcgatgcgttttcgccccggagctggtcaacctgatgaacgagcacacgaattttgaaatctgaataaacccatagaccatcactcaaaattacagtaccaattggcacaatattttgttactcaatctgatatatggatggcgctgtttgaatttttaacattagcaaaggcgcaacgggtacaaatcaactcagtttacctgcgtctcgagatcagctaagtgagcttgctttctcttccttgatcgacgagcagactcccggttggaaaccatcctgtaatttgaagccagcaaccgtttcatgcaagttctttgtcaaatattccttctgaaaagtaatgtttacttctactactagcgaatacgcccataattttcatgccgtgacagacataatgcttgacataatcgctgatgttcttggtgtaccttctcattctcttaacgtccagtgggtttgtgctttgttcgcatggaccgccctctatatccaacagcgactcactgtcagaatctgaaccacttgtgcctcccagagtttggctctccttcatgttcagagtggtagctgacgtgggacttgctgctgctgatcacagaaaattgaacaaatagtgagcaagaacaattaaagaactgagcattgtttgtgcctcatcattaaatgcaattttgatgcagtaacagcacttgtactgtactactgtccatgcatgtccattgctgaaatctccatgtgttgaaaactccaggttgcatgtgttttttcagtgtgcagtacagtagcaaatcattacatacatggatgagtgactgtttttggtgtgcaaactgcagtcttattaactgatgaaaattgtggaagaggacgtgtgttaggccataccacagattgatgattgcgactcaattgtgtagactgcaggatgccgtgcgttgaggctctgggactggggccatatgtgattgggaatgaccccagtgatggtgctctgcttgaaagaaaaacaaaagcataattaatcgagtaatcaatcatgcatatcaagaatcaagtacaatttaagataagcaaccaaagcttgtatgtatatgctgctacttataattagttgtcagtatgtactagtactaacaatcatcttcattacctaaataaattacttatcatcaattctcaataacaagtttttttttttcgaggatgttctcgataacaacttaatcaaccctgtcatgtaaactctcctgttaggctgttaacctgaaaaatgatttctcctcttcccttcccatgcttagaattcaggactccctcttatcatgctattcaaatattttttcgtgaaacatgaaacatcgtttgtttgaagtttgaagactaaaattgtgtgtggtgtgtgagcgtgtgtctcttctatatgatctaaaagaaacatccttcattttttttcctctctttttttttcttgttctctgctttcccgctgtatttactcccctccaacttaatacaatgatacgcaaaagcttatgcttattcgcgccaaaaaaaaaagagttttgaactagcaaaaaaaactggcaaacagtcttcaatttgaaaggtgttgcaggaggtgaacagtagcgattaaaaatttgcaggcaacaaattctagtcaagcataatatggaccgtgctactaccaatagaacaagaatcttagccgctctttaattaagtacacgaattaataatactccacccgttttgaaatgtttgacaccgttgactttttagcacattttgaccgttcgtcttattcaaaaacttctgtaatatataaaattatatgcctacatgaaaatatatttaacaataaatcaaataataggaaacgaattaataattacttaaatttattttttaaataagacgaacggttaaacatgtgctaaaaagtcaacggcgtcaaacatttcgaaacggagggagcaagtagtactccactcttttaatcaagcacaagcatgatcaacaaaataatcactcaccgtcaccgagtccgcgaagccgaagctggagaggtcggcggcggagaacatggcgaacggcggcgggtgcgggccgccgccgggcttctggtcggcggcggcgtcggcgtcgtcctcccccctctcgccgtggaagaacgcctcgaagttcagctccgacgggcacttcttcatctcctcgtgtggcctctgctgctgctgctgattctttcagcggtggtgaactggtggtggtggcgtcggagtcggatgcttttagagatgccccagcgaggcagatcaccgagggaggagaaggagaagaaggagaagggaaagctcctctttttcgccccccacaaagctgagctgcccacccgtgcgcggctggagcggtgtcagtccggcgtggaaagaggctagagtatcatccttgcccctctttcccccgcatatttaccaccccctgccattgggggtccttctccacgtgtactccactcgcaagcggtacttgttaggaaggtacgctgtaggtggtctcttcctacctccccggcggccggctccggtgccggccgtcagatctccgatgccgcacacgacagggaggaggcggcggcagcacgaccactgccacatgaggaggaggaggaggatgatttggcggctgtgacgtgcggcaccgaccattgcaacgaggagagactgcgtgcaaccgtgcgaggaggtagcggaagcgtgctccgcgagggagccacgtggattctaagatttattgaatcataattcacatattcaacagagaaatattagtaaaattttacagattgctaatattttaaatctgcttcgcgattgctctagtgagcttcttcaacaactcgtgcggccttgttgaataacaacaaataacgagcaatcatgcctctgagattaataaaaaaggcagcagcagcaagcttccaggatcgatcaatcagttggcaagacagcgaacgacggcggcgtcctggttctgggcttggaaccttggcaatctccttccccacctctcctcctacctccaaatcctttgcttagcttctagagtcttttagccccttgtatccttccaccttccacctcaaaaccttccactattgtaatagaaatcagtggcttcttgtattggattcgcactgctacttctgagtttgctattgttccaagcgagataactgggatcctaacaatctggtatcagagccaccattcccccaccaaattccaccatgagtgaccaagagtgcttggaggccaatcataggctagaggagaagatcgatctgattttgaagaagttgaatgagatagaagctaacaggagcaagttcttcgaggagatgagcgcctccatcaaggcgaccactactgtcctcacggctgcatcacatcctccactccaggcaccaccttcttcgacgcccaccacctgtttgatgaagtgctccaacgacgatcgtccttgggcgacgtcgagctcaggccacatcgacaaggagactgctccgacagttgccctagaccttggggatggcgaggacaaggttcatgacccctgcatcgtcaccaaggactcatccaaggtcacgcccaccatgtgttcgatgaaatgctccagccccgatactaagcccgatctcaccatggttgcggaggttacctacgccagcgcagccactgcctctatggagttggtaactgctcaggaaaccattggtgccatgtacagcgacacctctgaccattccaaggtgatgcacaccaagtgtttgacggttgtcctcgatgccattggtgacaccggtcaagctatggttgtgttccagacctggacagatgcatttaaggacgatccaacctccgttcagttcatggactttttctcatcaagtatgatggctaacatcaagtggaacacaccaatgcccactaagtgttcggtacagtgccttgggcatggcagcatggcattgatgcctacaaacccttttgatgttaatccatggccacctcctactctagaaaaatatagaagtcaagcagttgtgcatatgttgttatttgagacactattcaatgaggagctaaggttggagagaattgaattgaagccatggccacctccaacctacgatggagtaattagtggatgggattcacagcctatggctggtccaaaattcaaactctattgggcaagagtacgtcgtttgccaccttggccgccacctatcgaagtaagttgtcttgcattggtgtgtcatgacaatgtaatgattttcactgagctgaaggatattaatttgcattggggtgagctgaaaccatggcccccaccaagtcaaacaaacttcaaaaatattatggttcagcccgagcaatgcaagtattggaaaattagagtagaaatgagtatatttgctaggaaggagaagtggaatttacttaatcagaaaagttgcacaatggttgcaatatctagcttgaaggagcatgtcaatgggcaagaacagatctggtgtagaccttggaatcctagtgactacaaggtctcccctgacataattatgttgattacttcgtccgtactgcacccctatcatttggaccatattgttagccttacatatcctgaaggtttggacactctagttagtcataaggtggttcagtttgggagggctgatactgcatgcagtcatcaaaatagacatacaattgttaggacaacagggacatttgttaggcctgagcttggtactgggaatggtacacacatattacttgtttcagaggcagaagctggatatgtgtccataaggaatttgcttgaactgacaaggaatgctaggcagtggcataattccatggttgagtatttgtcatggtttgtggatgcatggatggttgccaaacatgcaagtaattttggttggtatcttagttgggcttcccaaattaaaaatatggtgaagaatttgttgcgacaggcaaatagggccagcaattttgacacttctatacttgagatgaacacacatgttcagaaacattcagcttatactcaagtgcatagcagagctgaggtagttactgttaaacctgaaacaaaggagctattgaacgctgaactctagtcctttgctatgcttgtcagcaacaagattgaggacaatgattttgtattgctgcttctgaaacatctcacttccttaagattgatagctaagattgcattgatcatgccatgggatctagctgaaagcgaaggacaaatttataaagcttttgggacagtacaagtgtgcaatataaatcaagagtggagctttgcaagttcaaaagtttatttgatatcgacttgcggacaagtcgaatttcaaggagaggggattgttaggatccgtgggctgtacgtgggccaattcagctgctacgcttacaaaggcccaatcatgtctatgagattaatacaaaaaaggcagcagcaacaagcttccaagatcgatcaatcagttggcaagacggcgaacggcgacagcgtcctggttctgggcttggaaccttggcgatctccttccccacctctcctcctacctccaaatcctttgcttagcttctagagtcttttagccccttgtatccttccaccttctacctcaaaaccttccactattgtaatagaaatcagtggcttcttatattggattcgcactgctacttctgagtttgctattgttccaagcgagagaactgggatcctaacataatcttgaccatttagagtcctaggttagggtcataatgacaagagggtcagaaaagggggaagatagagggggggggggagtcgttggttctattgggatgactgtgggtgttggaggactgacggtgggatgcaccatcggcgccgtggggacggaggagaacgatgggtcagcgtcggtggtaagggctaaacaaagcagttggtttggagctaggtggtgacagattatgcggtggagtacttaatggagacgtgaattaggggagggggggaggggctcgccggtgttgtttgtgccttctggccaaccaatgatgcttggtggcggcatcagtgctcgaggaagtgtgcgggggcaagctcgcgtcacacttgtgctgcgtgcggctagggaagaaggagaatgggaggaaaatgataagatcatattgttacgtacgaatcttaaagcatatagttgtccaaaatacgaaagacatgagctacgattttatgtcataagatatactcatctctagctcattcagtagtatagattaatgccctccgtttcacaatgtaagactttttaacattgcccatatttatatatatgctaatgaatctagacattattatatatatagatttattagcatctatatgaatgtagataatgctaaaaagttttacactgtgaaacagaggaaagtacaattttaagctgatgatgcgttcttaattagaaaaccactagttgactagttgtaacgaggctatatataggaattgaagatggattctcgtgcagaccagatttcggcccatccacgtccaatgttaggtggtaaaagttcaattttcgtccttcaactctatatcgagttttattcgtgtcccttgtctaaaaaaaatctaccttactgagtggtttcgataatagttttatcacatatgatacagtataggtttaactggacccaggtatatgtgaaatcctccctttcttctacacctttgaatgacgcgagtgacagcaaagtgtatggatgtgacgatagtgctaccatatattgcatcctgtgtcgccattatcacacacgaacgataactatatattgcatcctgtgtcgccattatcacacacgaaccagaacgcaagtgtgacaagggctccatggtctccgtcccatgctttgccttattctatgtcctcgtcttgacactagacaaccttatcgacgagattgaccgcttggagggcctcttctcttcgcctcatcgaacaattcctctgtttgcacatttttaccacaatcagccacccagttccctgatcccctcacctattctcattgaaaataaaactaaacaaaactgacatattacatattatattcaaaacatttaatgggtagcatcaaaattccaacaaaaatatgaattattggattagtaagagcaagtctaataatacagccaattgccggtgacagtagtatccaggtcatcaaaaaccttcataagagccgtcaaatacaataacagttataataggatggtccaccatattatctaagagaataattaactctgacaaaagcacaccaaaccttctctctctaccttgtctccgtcgcgccagccaccacacaccatccatttatttctgatatcttttgtgtactctcccatcttcttccttgtttttttatgaacacaagcagcaggccaagcttgctcttgagcttatcgtgggccgtctcccgagtccttacacgtggatgctgtgtcagcccgcggcaccacctatcgccgccatggtggcatgtcctcgagctcctctagtcatcttcatgacaaccttgagcttcacgggtaagctaagaagcggtcgcaagtgagtccgcccgctggaggtctggagcaagctaagcaatggtgtgacggtagcgagcaagcaaggagatgacgacgatcccgcgacaatctttagctccttctctcctcatcaacgccttcatatgggaagttgtgctgtagtcgggtgataggatagtcgccggctcacattctctctcactccctctcccttccaacccatcaccacattcgacgtggtctccttttcgccagtccacggtgtcttattatacctgctctaatatttgataaggtaatgatgtgatttaaaaaaaaaacaaaattcagttgcaaatgcacaggcattcgtagaccaatcctaccacgccgaccaaacaccaccttccccgccactagcttatcctcctcgtcttcccttccatcccccaacccaacccaccaccgcctcgccgcggtcgccggcgagaggcgccgcgctgcgcgcgtcgagaggatcgcctcctcctcctcctcctcctccggcagccatgtcctccatccacttcttcccggccacctcccaggccgccgccccgtcgcgccgccccctcaccaaaccctccccaaaaccccccgccgccaccgccgcgtaccaccgcggcggagacaacgagccggtgctcttcccgcgcctcttcctcaggaggcgtgcccggcccgccgcggcgccggccgaggcgccgccggtgggccccgacggcagcagcagcggcggcgggggaggaggaggggaggggggcgggggcggaggggacgacgaggaggatgaggggacgaggaaggggctgctgccggagtggctcagcgtcacgacggacgacgccaagacggtgctggccgccatcgccatctcgctcgccttccgctccttcgtcgccgagccgcgcttcatcccctcgctctccatgttccccaccttcgacgtcggcgaccgcattgtcgccgagaaggtccgtctgctcttccttgacttctttcctttttgtttttgtcaacagaggattcagattttacttaaatgtgctgattactgagttccgggtgcacacatttgcctaatgtttctgataaaatgtgtgccttttgaatttcgacttgggtaagtaatcaatacagcacaatcgtagaaatttgttcacgtacttgttacttgttggtttgcttcctggttgcgtagcatatgatgatcactgccaaattttgtttagacgataacctggtataagcattggtaaaacaaaatccccaacatactagaattccgcattgacatcagcaaataggcatatggacacatgacacatgttcacattatcatgctcacctctgcaggcaatggctgatcttttgcatattgttttgtccagccatcagtcaaacagtcatatatagcttgagttagctataaaaattatgaatgagctgttttaaatgggtttcacagcacttctaagtgtaacagggaagcaggcgtagacagtccgattgttggttaacattttaggacatattttttttttcatttttgtgttaaattataagaaatgatcatcgtctagttagatagcatgccttaatatgttctatgcctcctgttggcagtaaaaagttctgaaatgaggctatttattttgtaaaaaactgccttcacaagacttgttcataatctcaatagactttgatcatattggggatatttggagtaatatacgataacctacataagtatagaaaacaatgacaatattccacataaaaaagagagcatgacaatatgcaccctttgaattgcattaatctttctacataatccttagtccaaagtatgtgcttgttgtcattaacagaactagcacggtggcccgcgcagattgcgcggctagcatcactatattttctctcatataatagcatatatgttttctcattatattatttaaatatattaaaatgacaacataattttaaattttgcagtaactttacaaaactaataatgtgtaatattcatattgtattttatatacgtgttagttattaattatttttaatatcaaattttagttatttgtaaattatatatattcctatatggactctagacttgtcttttaatatttcttttttttttaattctgaattttctgtaaattgtatttctatatagactctatgctcttcttccaatattatttattttatttctgaatttttattatttctaattgtatttctatgtggactctaaactcatctttcaatattctttaatttttaatttcgaatttcagttacttctaaattgtattcctatattgactttaaactcttcttcccatgtttttcttaatttcgaattttagttatttgtaaattgtatttttatacggactctaaactctacttttaattttattatgtttatttcaaattttagtttgttttaaattcctatatggactctatactctacttctaatattccttaattttaattccgaatttcagttatttcctaattgtatttttatatggactctatactctacttttaatattccttaattttaattcggaatttcagttatttcctaattgtatttttatatggactctatactctacttttaatattccttatttttaattccgaattttagttatttcctaattgtatttctatatggactctagtctcctcttctaatatttcttattttttaattcctttcaactatttctaaattgtatttataaatggactctagtctcctcttctaatattccttatttttttaatttcgaatttcagctatttctaaattgtatttctatatggactctgccttttctttttctccgattaatgtgagaatttctaggccatgagagcgagtgtggaggctcctttttctattcctttaataatataatagatgtcacaattctctcaaacagttcctagtacatcttgggcacagggtttgacctatcggaacactgatttgtatcgggggtcaccgaagttctgaaatttcggaaatattgcggaaattttggacgatttttttttaaaaaaatgaattcaaatttaaaaattgtgggcgaaatttccaaaaaaagaacaaaaacagatagcaacactcgctctgtttggcagccatacaagcagcagcagctgcatcacaaatttgcggcaattcttaactactgcagctgtggcaaccaagctggaaaaataccaagctgaaaatgcacaaggaaatataccaatctcgtcctagaaccaataagcccaaccattcttccatcaacttctagaatatgagatgcacatgaacagaactagctggttgttgaagaatatactgagaacaaacaaatgtgaagaagagggataaccaagctggttgttgagcaccatcaccttcaccggcaggttctcgacgtggatcatggcgagctcctggatgttcatcaggaagctgccgtcgccatcgatgtcgaccaccgcggcaccggcggcggccggcaggccgaagcccattgcgcctagcctggcggatgagagccactgcctgggtctcctgtaggtctagtactatgtcgcccacatctggtgctgcccgacgcccggctggagcggctgcaggcgacggctaggggcgccggtggtgggctgcgtcggggcggcgaggcggcgaccggcgtcgaggcggcgcctggcgacttggcgagatggtgatttttttcgatctgggtgtggtgtggcgcaatgaggggaggcggagggggggagagaacggcgatttagggttaggggagaaaatcgcgtcaaattttttttggccgaaatatttgaccagagctcacttacaatcgggacccaccgaaacgcccgaaatttccgaaatttcggttccaaaatttccaacgccgcttcggcataatactgctttgttttatccaactaccttttctagttgtgatgattgattagtccattattaatattttaactacgatgaatcaggataccaaattcattgtggttgttgcttattttcatttgctgaattccaacctttagtgtctttataagttccaaaatttgtttaaatttgcaagatggtatgatggaccactattaaaggtcacctgcatgggtgtataacttcaccctatatattgttattcatgttgagtttgtttatatttctgtcaaaagatgtctttttatatcttactaagcaatgtattcacatcatatcataaatttaccatatgaatgcttttcaggttacatactactttagaaagccatgtataaatgacatagtaatcttcaaaagtccaccagtgctgcaggtacttgcatattagctaaaagtgtggtgttttgggaatttggatgatgtttgctgtttttcttgatatcactgtgaatgtttctgttcaggaggtcggttatactgacaatgatgttttcatcaaacgaattgttgccagggagggagatgttgttgaggttgctttcaaactgagaaacttctttttcatgtgtataactatatcttgtaatcttcacttaattagtttctttttctgtctatgaattccttcctgcagtctttgtgtgtgttaatttcaacaccatgaaattctttgaaattttttaggtagtccaaggagtgtactaaaattgggaaacgtttactccatactgtttaagcattggagaaatcattatgtctattatgtgatcacaaaatagatttgtgatctttccatcttcctgtgctcactttgtgccatgagctgcttcatggtctcttccacatggcatgatactccacgtcagctgcaccaggctcaaaggcaaggcccgctatggcaactcctcagccacatggcagttctactttggggatggtggcgtcagtcttgcaggaacggcattgatgtttgagatgctgagtgtggatgtgaatgctggaacagtctcactcccacttgcagtggctagggcggtgatgctgtcactgatgatgagtcttgatatcttgttcttgtatgttagcctacaatgagtctgaggtcttatattcttctatgttagcctcctcgctgccactttctgccctcttctcctgcattgttgttcttcagcactgttcttccagatcagttgttttgagctagaatttgcgacaggatgacatgtctcatggaactttagtacttgtgaagtataacataagcaatagaaaaatccttaccctatgaattgtttggagtgacctacttactgtgctcaagtattaatttaggttctttctttctttctttcttttgaaacactgtgacatcctcaaacaacaaaatacttaattttcttttcatcttattgcaggttcataaaggaaaactagttgtcaatggtgaagttagaaatgaagagttcattcttgagccaccttcttatgacatgaacccagtggtaagatattactgagccacccatgaatgatacatgagctcaataatgtaacaaccaaccaaatatagtttgaaccacattccccagttaaggctgatgagcaataagaggattaagaaaacacaaatggtttattagttttgattcactgacactacatatgtggatgtgtcagtggaatgaatggagacatttgaagaaacaatcttgattagatcccttactgttactgatttttaaatactttatctgcattaataatcagacgtatatcatgacgaattacatataaaaacttgcattttgcgtgtggtatacctccaagtaagctgaagacataaaatttctatagaatctattgaatagtgctcactagccacacctaggtggatatagatatggttaccactatttatagatacattattgtgtatggtttcttgtgttgtgtgctgtgtgcatattctgtacatatgcatgaacatgaagttgtcaacaacacttcatacttgatttatgtttcaatccttgtagaagaaaaatgaacatgattcttttctgggttatatttttgtgtttgttgatactatgtttttcatgacagcaagtacctgagaactcagtttttgtaatgggagataaccgaaacaacagttatgattcacatgtgtggtaatactctctgctgattttcccatgttacttactattaacttgttttgtatcttaattgaattggcctgtacaatactgctattattttcctcaggggccctcttccttctaagaacatattggggagatccattttccggtattggcctcctggccgaatagggagcactactactgattgcctcatccctgagacaaatccaagctcgcttattgatgtcaaactggcaaagtagaagttcaggcattgattattgcagtgtgaagtttgcgcttcatgtaagctcctattctttaatattccctctctcctggaaattcggaggaatatttgacagcaggccacgtagaaattagaaaggagaacacatttggttctccttgatgtcacaaagaatgctagcaactagcatgagcatagaaaccattttgtttcaaggtttctgcgactctcgctctttgttgtatattaagactgtaaggatgttgccttagtgattcgcatcaaatgattcttcttgtacatcacgttttgtagcaccacgtgtgtatcatcctcatacagtgcttgacaaaagatgtgtaacgcgttgagccggcagttcacttcattgccttacatgttgctaatgctgacagattcttcagaattcaagttactgccatccttttggtctgtatgaacaattgctcccccgtgtcggtgtactcatggatggcatataaatatttaggtttaaagaagtggattgaaaaatatatattggttatcaacaatacaatttcccaaactatatatgatgattctatgagcagggatcctgcatatttttcagacgggagaaatctgaaatctgtgcaacctatatatatatcaatccatccacgcggcacgtcccttcaatatcaacacggtggcgtgcacaatacacagtcgcacagaagaataacaaacaaattggtgggtgttagtttccctctactgactgaaatcgcttgcttgctttagtttagtcgcgttggcatggaagtaaaacccatatttagtcagattagattccctcctcacgcagcaattggcaaatgcttggttggttcgcaaacgcactactaagagtgaataaacagtcactgcaacatggcccagcagcaaattaagcaggataaggccatcatttcgatccaaaccggccaaccaagcaagaaaaccagcaacacgtctcgatgtcatcacatgtacatgatctccagcgatatagagcgcgcgcggcgacgagtcacgactgcaatttgcgacgcaagaaacctcctccctttagatcgcggcaacacatacgttatctctgacaaacaaccgtgaaaagaataatggccgtttcggtagatcgatctccaattgacgatcgaattgggaagaagcacctctaaccttactgctccctctgatgtggtgttcactgatatatagactcacaagctatggaaccgatatgccaaccactcaaaaacagagaaaagtaaattagagattcatgagctgtgaaaaataattaagggccgttttctagctgtcctattcatggatatgatcaattggtaagtgcctgcaggcacctagccagagactatcccgccgtattatttcgaccaaattctccaagcaaacatgggaagatagatacgtactcctacgcgtgtgccgtggccgtacgtacgtgtgcctgcatcttcaccgcaagtcatgcacatgcgcatgtgcttcatcctagcctacgttgctgttcccgctcgccacacactttcgcctttctgacttacacgcgcgtatatatacacgcagcacgtctgcaccggccgtttcaccattcctcgaacaccatcatccacaaacacacaagtacatctcgatcgaagctagctagactagagcacgcacacgtacgatctcgtccatggcgggcgtcgctcgcatgctcgcggccgtggtctgcgcgatcatgccggcggcggcgatggcggccggcggcgtgggcgcgctggagccgagcgggtgggtgagggcgcacgcgacgttctacggcggcgcggacgcgtcgggaaccatgggcggggcgtgcgggtacggcaacctgtacgcgcaggggtacggcacgaggacggcggcgctcagcacggcgctgttcaacgacggcctcgcctgcgggcagtgctacaagctcgtctgcgaccgcaagacggaccggacgtggtgcaagccgggcgtctccgtcaccatcaccgccaccaacttctgcccgcccaactgggacctccccagcgacagcggcggctggtgcaacccgccgcgcccccacttcgacatggcccagcccgcctgggagaagatcggcatctaccgcggcggcatcatccccgtcatctaccaaaggtaaacaacacaatcacatatgtctagtggtcgttgcagtgacctgaatagcactctaaggttctaagttcagatcttcataggagtgaatttcagattatgttgtttgagggactgagtttccgattcaagacgatttgagaggctggataaaaaataccattctctaaaaaaaaattatcaccttcgacatcgcaacatcgatcaagcattgatgattgattctactgggtggcggagtcaaaaaaaaaaacattcacatataaggctgagctaatgaaagttcaaatattttcacaaccacatagtattttttaagattataatgagagctatggatctaggcattaggctcgagtcctggctgccccatgcctgatgcggcctcaaatttgtactaccaccgtaaaaatcactttatttttgatgtttttgtgtagggttccttgcatgaagaagggcggggtgcggttcaccatcaacgggcacgactacttccagctggtgctgctgaccaacgtcggggcggccggctcgatcaaggccatggacgtgaagggctccaagtcgccggactggatggccatggcgcacaactggggcgcccagtggcactcgctggcctacctcaccggccagggcctctccttccgggtcaccatcaccgatggccagacgctcgtcttccccaacgtcgttcgccccggatggaggttcggccaaacgttcgcgagcaacatacagttcaagtgagccacctgatcgatcgaagcttctatataggcgcagctagcatcgtcgtgcatatgcgtgaaggatttaatttggcgtccaaactttatatatacttcttttccaaaatgatcgatcactctctcaatttggatgctgatgggggttgatttactatggtattgtgtaattaattaccagcctgaaaccaacattttcattgggcttttgtatgtatgtgcgatgtacataaagagttcgatctaaatgattcttatggaagtatgattatcacgcgatttgagtaaactccaaatttggtgtttagttgagtagaccataagttggattcccttgaggagataattacaaggttcttaattagtgtgttaaatttgtaacaccttctggtatatagctattttggttcaaaatccgtaaaaagatctcagataataaaattgtcgaacgatcaacttgttggaaagtttttgtaggcagtggcgagttacattggggtccagtagatcgtgtatagtagttgtgcttgcttgttaatactacctccgtctaaaaaaataaataaatcaaatttaacttacgaatatggactgatgcttattgagattcacagcgaaagaaatcaattttaacttatggatatgttacaaccgtgcgcgtaagtaaggtcgatctacacgcgatgactatactttgtttaagatattcgcaacgggaaatataatcttgaagctagctaccttgtgcgaaagattattagtcaaaacggtgaagtacatttgtgggtttccagcgtcaatgcacctagctagaggcagctatatgtatatagcttgaacagtaagcgttagactctgcagctaattcaagcaatggcgttgagaattcgttccccacaacatccctcacatgcatatgaagctactacgtacttgggatttcgtactaacggttcagttttctctcgttgaccttcctggcgtacaaaatttgtcctcgctttgcgtcaatataatccgcctcgacgaatgcaagacgagaagcccacgtccgtgcgcgctgtcagcccagcccaatttgccttatcccttttcctcttcttgccggcccagtccacttcctcttccgttgaaaaacgagatttgaaggaagagacgtctctctattgtgttgaggattgaacatgggactttagtattactactacactataaagtgtatctggcttcgtcttccatttgtcttatcgcgataaccgaattgagctagatcgagcgtaggcgatcgaggtgcccggttccggcaaacgatcaagcttggggaccaacatgatggatgggagttgggtaacgagaagactcgctgtcgccgatactgaaacccgctacggcggcgccaccgtgcgtcgtcgacttggctaattgcaacatccacaagaagcaacctgtcacaacaagtactacaagtctctacctgatgagcccggcaaggtgcaccgctgcagctacctcctggtgctccgcgcgcgcggcgagctgctgctgtccagcgtcctacaagctacaggacgccggctgcaccggccacgagcgcccctctcggtgtcggtgcacgtacgctttccattgcgacacagccttgcacgcgctcgatcacgatccggacgacgacgaggcgccgccgccgagcatgcatgggagagaggagagacgacatgctcggtgaccacgtcctcttcctgggttacccgtgcagcttctaactaaacgttaggcaataaacgataaaagaataatagatcaatcataaaagacacaagatttaacgtggaaaacccttccaaagcaggagagaaaaaaccacgagcgccagccaacaaaatatcttcactatatcggggtgagattacaacaccgaacgacggcttaaaagaggtatatatatgatggtggaaccctaaaagggatgacgatccgcttcgctctggctcaagcctccggcgacaggcctccgctgcgctccagcagaagctagcctttattatgtgtaaatgaatttggaccacaactcaacagcttcgccgcggacgccgtgcggtttggctgggacgcgcgcccaacggcagcgttgacttcgttgttaggtcggagttagtgtaggaagaaatagaaggggtttaaataaactagataaactacttccccttcccatttacatatagtaaaagattttagtaggggcttcatgagagctctcatggtcctcgccccagtattagaggctcgagaccctgccacattcatgctagatccgcccttgggtcagaccgtcggagccttgccgtgtgtataggtacaacttcacgtggatgcatggcggcagtggcggcacgtgacactggtggacatgctgcccgccgaatggaacgacaagagatgcacgtggttctttgctgagcccgacattaatgcgaagaagaagaagaagaagaagaagaagaagaagaagaagaagaagaagaagaagctccagcaagccggcaacgccgagacctgtggatctacgttgtcgatctatccccgaaggtggatacgaaaagcacaaaataaatttcctaagaggctaggactaccttaggcaactctcgcaatttcctaagactaaccacaaaataaattacttttaattgaaaaaccatatcatatcatttgtgtgtagcactagcaacttttgttcgaatggtcagaccgttgctgacgttttatataaaaaaaagggtatcctattttaaggagaaaacgagaccaaactttacaatgcatagttgggaaaaagtgaaattaaaccacaactacaacaaactctccaactacgacggcaacaaaaagggacagccaaacacaacactcaacaaacgttgctcaacatgtgaacaacaaggggccaatcaacaagctagaacaaaacaaaactcctacactggtcggcgtcagatgcggccctagaagtgaaggcatgttggatctggggcatccacaccttggtccggcaactcaccggctcggctggtgatgatggcggctccatttattggaggatgtcgacaactgtggtgcaagaaagtaggccacctccatacgctgtgatgggctagggcggctccaaacacacctgcgagcgagcgcaaccgatagtgggattgctctaacatttgtagctcggtgaagaccaaggtgaaaacttgaacgatgatgcctgtgggcgtcgtttctttcttggaagcattttatgtgtctccccgtccagttgtgttttgattctctgggttaaaatctagcacaattcttgaatcggcgatgaagacgcattctggcatcatgtccttcttgaagtcatcatggaagaaatccatggtagtccctagttttaccttgcattgcatgaagaatggcatttgggaagtctgagctgcaatgttgaggcattcgacgagcttggcaacgatgactcgaagctttgcttggtttcattcagggtttgtctgttgtcctttgggaagtcagtgctgctgcgcgattgcaagcttggcaacaatgacccacatcagaccacgtcagtcgtgtttcgctcttgtgtggggtagcaagcttttcagtttgcatggcttgtcggtcttgctcacccgtgcacaagcaagactggtgatcgtgaagtcggagctacgacatcgacgaggtgcgacgtgtgacaacgatgacatgagtccttttgagttatgcttcggcatgggtcgaggcgttgtcctgacttgttcttgacgaaggtgttggagtcacctgatcacgtgggtgatggtgtaatgacgagcactagcagcttaaacctgccatacttgagccacacacatgtgacatatggtattcgtaccccatcacagaccaagtcatttgtgaagggcaataaaacacaataggtgagtcatgtgaggttggaatttccacccggttgatcataggggttaactcttagggaccctgtttagatgggactaaaacttttaagtccctatcacatcggatgtttggacactaattataaatattaaacgtaaactattaataaaacccatctataatcttggactaattcgtgagacgaatctattgagcctaattaatccatgattagtctatgtgatgctacagtaaacattctctaattatggtttaattaggcttaaaaaatctatctcgcgaattagttttcatttatgtaattagttttggaagtagtctatatttaatactctaaattagtgtttaaatacagagactaaagttaagtccctagatcaaaacaccacctcataaattcttgcggaatgtgacattggatctataaattttctttttaacataaaaaatttcactatgatttgtgataggtattttatacggaccatcattgtcatatatcactgatgggtctcacctctattacgattactaggatcctaccatcacactccctccgtttaaaaaaaggcaaactctggctgtgtagatatgatgcatgtccagatacatagttagagtatactttttttttttttgacagagagagtacaattgtcgtagtgcctattaaagccttagagggtaataaatagcgtttttcgcatcgagcaggcccatgcatgatgcttgtagagtcgtagttgagtctgagcccgactttgcgatgaggctggccatgtgcacccatatcacccggttctccctaatcagatttatcgattacgagtttattatagactagaaaaagtgcccatgcgttgcaaagggaagaaaattaaggaaaatctccttggcggatccgaccgtttggagcagagggacgcaagctgccgtctgtctcgaaggcccgtccatctcgaaggtggagcaaggagagcggagccgataggtggcactaaagatgacatatgtttttatgatctcgggtgtgttaggtcttggatacgactcatatgttccgcttgttattgtgctcttttttgaggatttttgttctgtcacaccctcattttcgtttaagggatttgtaaattatttctaaaatttatattaaatttcattaatttacaagtgaagtttaatgtgagaaataaaatttcctaattaaaacatgtctatatttaatcatttttaaattatatatccatgattaattatactcttaggaattttcctattattaattttaataatacaaagaacattttagtaattatttaaacaattactccttccatctatttttgatagttatatttcatcttggcacaatgatcaaggataagtaattctacttatcatccatttaaacatgccactagttattcctctttttttttcgaacacgcaaaaggattacacgttaatatattagaggaatagagtttttgttacacaacgcaatcggccaaaccggcctatgccagagaaggaagaaaacaaagccaaaaacaaggaagaaaaagaaaaattcgtacgacgggtaacgctactccaaacaacgagagggggcagagccacgctacactcccaacaagtccccaaaggaagcaacgcccgctaatgaccacgcagccgaccctccgaaaggactctagaactactgagaccgaagagagcgcagagtcaaacatcctagagttacgttccttccacagctgccaagagaccaggaggaccagggggtcgaagctggcacggaggtgatcaggtaaacaagccctagaagatggctaccagtcctggagccagctgccacggggttgggggggggggagagcaatccacccaagaggtgacagcacccgtaactagactcgacgagcgaacacgcagtcgaggaggatgtggtttgccgtctcaagctcttgagcgcaaaaggggcaagccgagtggctattgatgccacgcttctagaggagatcagccgttcaacagcactgctgaaatgcaaaccagaggaagaatttgtatttagtagggcccttcacgtgccagagaagattgacacaagcaaagaagtgctggccaaggaagaatgcctggtacaccgaacgcgccgagtagtgctggtcactcgtccaacaccagacaagacgattcccgacacccgacgaaagctgaatgtgaagcaccatgtcccagacaagaagaaactaggagatgaccgggacagtgagggcgctgtggatgtcaaaaatccaagtgttgttcgccaggccagaagcaactgtgcacgaaccacacggccactgatctggagctaaggaggcaaccgagcggccattgatccagtgggcagaccagaaaagaatcgactcaccatcaccctgcacgaagaaggtggatgcctgaaacatgtcagaaacggcttgcttggctggggcctttaggccgtcctagtaaggatgccctgagcgctggagccaaagccaacaaactcgcagggcaaaccctaccaacctgaggtcagcaattcctaacccaccgaaagctttgggatgatagacattcgttctagacactcggcactgcccaccatgaaccgagtccgtgcccgtccacaagaaggtgcaacgcttcttgtcaatggccttgatcacccaggttggaagaccgatcgccatggacacatggactggtaaggaggagagaacagactggaccagcacagagcggccagccagagtggcgagtcgtcccttccagggtggaagacgatgggaaactttatccacaagcggttgcagggttgccttcggcaacttgtgaacggacagcggaatgctgaaataggagcagggaaaaaccgaatcttgtgtggaagaatgaagagtcgtgcattaaatcctcataaacaagcgattcattgatatttacatttctcgatgcgcatgtagccaatcttgtgtggaagaatggagagtcacgtattaaatccgagaaagtcattaatatgatacgtggttggattgaaatatgtctatcaaaagtaaattttttagatttggaaatatgcctatcaaaaatagatggaagggagtattaatgattaaatggtctagataaatattttgttaaatactttgagtgtccaattattttcatgttttttttgaaattatttaagcattggaagtgtttttgaaaattcaaagatcatttcagtgattaacattgacgacgggtgaggagacgcgatggcgcatgtcgaaaagagctacgtccacgtacgctagctctctggagaatcgagggtccagagtcggactgcttgcacgtatccatgccccagccgcaagcaatataatcggacaaatactactacgtctctatctctatttctactattaagatgtttttactggtggtttagtaagtcatccgtatccgaatctaattgccatatgctatcttcgattcaaaaactactgacgtgatccgtgggaagcagtgccatgtccacgtccgattcccacgtacatcgccatcgaatccaaatatgctcccgttgcctttttttttttcttaagcatgtccaaagcaccccctccgattcggttttaccattgccacgagcccacgatcaagcgagatggacttggctctgtactccgtagagattggagagatgtgcgcctggttagattggaaggaaataccgatggtgatggcctgcatgtgcatggctgcatagttgcttttttgcctaatctataactaatataaatattcgtattttttcgtttgtcacatctaattttcgtccgtgttttcgtccatacacaatccgattcggttagcaatagccacggaaaaaaactacaaaaaaaatcggtcgtcgccgaaccgccgtcgccgccgcagggacgcctagccgccggcggatcccctcctgctggatccggcggagggaagagcgccgccgctgctaggacgccgacgggccaccgccgcctcccctcccgctcgatccgccgccggtggtgggggagggcgccaccgccgctgccggtggtggggaagggcgccgccaccgctcgtgggaggaggggcgccgtcgccgctgctcggggggaagggcgccgccgccaccgccactcggggaaaggtcgagagagagggagagagcatcgggagcgcggaggggagggtggcgaagagagagaagggagggaaggaaatgggctagggttttttcggcggctgaggagagggaggggggtttgattccccgatctcgacgctcggctgtccgatcaaaaccctagagatcggacggccggcgtcggccgggctgaaattggccctgagggatcgagagcgaggccacttttctggcccaagcctaggttgcggcctggagaggggaagtgcgcccgcgtgtttgcaaaagccatgggccgactagcaagggctggaaagaagtctattttaggtccctcgggccgaagaaaaagagaagttcattttagtacttttttttccagaagcatttacgattatagttattgaatgtgtttatttctgagcaaacctaaaaggaaggattttctttctttttccaattaaataattgttaaataatatttgtattattaaaattagcaattaagctctgaaaattccaaagagcgtaactaattctagagaatttaataaaattaaatttaactatgtcattttatttctcaacttgctttacttgtaaatttatttaattatacacttacctaattaacaataccaaatatttcagcgaatttgtagtttaattaattgcatatttttttatctgtacgcttcccgttgcaacgcacgggcacttttgctagtccctcataaagtataatttatactactaggatactacagggaaacggttttaacagctcgtggatgtccactagtttattgcatatcatttaaatagttatgaaaaaaattaaaaaaatatgaataagatagatcaatatgtaatatgtaatatgtaatatgtaatgtatcaatccacaaacatgcaagctaaaattcaacttctacatattgtaacaaaaataacaaacaaaactcaaattaatatatgtatgttgacagttaaatttgttgttttttttacaacttgtagaagttgaatttgaactttgatgtttgtggagtgatatattacatattgatttatcttatcaattgttttaaaaaattttcgtaaccatctagttgatatgcaataaataaacaggtggacgtccaatcaagttattagaatccatcccgtttacgtttagtttcttgtattttggtacgatgagagtatgaccaattacatactaggacgattggtacgtaggcacgcgcgtgtacgtctttgatcgagatcgagttgctgttcccgggagatcgatcgatcgatacacatcatgacgttaatctcagacctcccaccggagctgctcccctgcatcgccggccacctccacgccgccgtcgacgtcgtccgcttccacgccgtctgcagggagtggcgcgacgcgctccgctatctgccgcggcgccctagcttcctcccgtggcttctcgcgccatggccgacgcccgacgacgacaccgccgccgccggcggcgcgtgccgctgcgtcttctccaggacgacctaccacgcccccggcctcggcatccgggacaagagggtggcccactacgacggcggggcctcctggttcgtcggcggcctcttcgtcaaccctctcaccggccgcgccgccgcctgcgccgtcgacgacccgtatctctcggactggattgataacgagggctcccgctgcatcttctccggcgacggcaccctccttacgtgctgcttctacgacgcagggccacccttatctatctacggtgccatttggtgccccgattaccaacaggtatggaaaagactcggcgacgccgacagtgacgaacgcgcctgcgccgtcgcctaccacgacggcgccgccgtgtgcgtggacttggcgagatgctacgtccacgagatcggaggtccagcagctggggatcaaaccacgtttctgccgctgcctgatgagcccggcaaggtgcgccggcgcagctacctcttggagcttcgcggcgagctgctgctggccagcgttctacaagacgccggctgcaccgacgacgacgacgacgacgacgacgaccgcctctcggtgtccgtgcacgcgttcgatctggtggctgcccttaacgctctcgatcagctagatgcagctgtggacggcgccggcggcggcgacccgccgtcgccgtcagtgtgggagaagatggacggcgcaaccggtgaccacgtcctcttcttgggctacccgagaagcttcgccgtggaggccgcgaggtacggcggggaggtgcccggcggaagcgcctacttcgtcggaaggtcgaagccgtgccgcgtgtacaggtgcagcttcgaggacgacggcacggcggcgacgctggtggacacgctgcccgccggatggaacgacgagaggtgcatgtggttcttgcccgagccggacattgctccggtgatcggagcacggacctaggaagaagaagaagtagaagctccgcgaagcctgcggcggcggcgagacctgaggatctacgccggcgatctgccacagaagatgtatagatccaggcggcggcgagtgatgttcatcaggcactggaaggaggtgttccttgcgtgtactccaatggagatgatctacgccttatgttttgttggcctcctcttgttttttggctcactattttgtaggctgatttgcggttggtttttttagttttgctatgttttagtgtactagcaaaaggatcgtgcattgcactgcatgcataacgacatggtgaatgaagtttgaccttaacgatttatcaaaacacccaagtatatatgattactaggtgaaaccccgcaaaaaaaataacgtgtaagatagctagataacatcagattaagtaaattaatgtggtttataataatttaaatttaaatagtgtgtagaatgatgattcaaacgaaaaactaaggcggcgtgattttatggaagaagaaaagtaaggagatagtttggaccgtagattaatcatctaaaggcaaaaacaattgatgtgatatgatttaattagaggaaaaaaaggagaaagataatttggaccatagattaatcatttaagcactaactaagtgaggatgaactatataagtatataggatatcataaaacataataaagatatacgttgaaacattatgtgaattatattggatgataatttaacatgtttgtatttgaaaagctcttaaattataaaaactataaagatatagcatgtttgcatgatgtttaaatgtgatgattgttagtggatgatgatgtggcatcttgttaattagtggatgatgatttgacatcttgttagtggatgatgatgtgtcatctttgcatgttaagcttaaggagttagaggaaaaaaaggagattaatcatttaagcactaagtgagaatgaactatataaatatgtaggatattataaaacatagtaaatatatacattgaaacattatgtgaattatgtgggatgataatttaacatgcttgtattttaaaagctcttaaattataaatactatagaattatagataatataacatgtttgcatgatgtttaaatgtgatgattgttagtggatgatgatgtgacatcttgttaattagtggattagtagataatgatgtggcatcttgttagtggatgatgatgtggcatctttgtatgttaagcttaaggagttagtaggagataactttatagtactttatatttatagtaagataggataagtggacaattattacaaaggtatatttgtgcttggcaatttgtacgctatacacatgtggaatgtggacgatgctcgggacacatgggaggaatggcggatgggctaatgactcacctttgagcaggaggcgatgatgaaaatttaggagattattaaatatttcaaattacatttcttatgaaactttataatatttttttcacaattgatgatttttatgcatgtgcattgattataatcacaatgcaataggtcgaaagttggtttctccatgtgtatgatctcttgttgattcggagcaggtttgaaatttcagaaactccgcccccaccggcaagctcaaatctcacccgaattatttgttttatttgtaattttttatgaatttggtcaaattttattcaaattcatttaaattcagacaaattttcaaataatttcggctagaaatttctaaaattttggtgaccccgacataaaattaaattttgaaattgaaaaccccgagtcggagtcggagtccgactcttcagtcttcacccggcctgatcgagcaatataatcagattgatcgattacgacgacgattgattagcaatataatcagatcgatcaatattacgaccacgattaattattacgtacgtactcacgtgcacgtcttgatcaaagatcgatcgagctgcagtacgttccggccctccgggggagagatagatcgatcgataggtatatacctacatcatgacgtcagtgtccgacctcccaccggagctggtctgcctcatcggccgccgtctccacaccgccatcaacgtggtccgcttccacgccgtctgctctgattggcgccaatcgttacgccatattccgccgtcgccgccgccggccgccgccttgctgccgtggcttcccgcgccgtcgtccggcgacgacgccgacgccgccgccggcgtggcgtgccgctgcgtcttctccaagacgagctaccacgcgccgggcctctgcttccgcgacaggagggtggcccacgccgacggcacggcctcctggttcatcaacgacaagctagtcaaccctttgaccggctggatcaacgtcggccgggttaagaagtatccatggatgtggaccgatggcagcaagggcttcttccactgcgtcgtctccggcgacggcagcctccttgtgtaccgcttgtcgccgaggtggcgctctccggacagattatctatcacgcctaccacggcggcgccaccgtgagcgtggacttggccaactgttacatccacaaagagccactgttctggcttctccgcacgcccctatgccgctacctgacgagccccgcaaggtgcgccgacacagctacctcctggagcttcgcggcgagctgctgctggccagcgttctgcaggacgacgacgacgacgaccgcctctcggtgtcggtgcacgcgttcgatgtggatgcagctgtgcacgcgctcgatccggatgccgccgagccgccgccggtggcggcacggcagcggcgacgctggtggaaacgctgcccgccggatggaacgacgagaggtgcatgtgtttcttgccattgccctgcattgttgatccggtcctgacagaagaacaggaagaagacgccgccgctagggcatatcagcagcggcggcagcatcagcagcgagacctgaggatccacgtcagcgacctgtcgccgcaggtggatagctgccggctgcgagagatgtacagcgagcacgggaaggtggtgcgggccggcgagggtcgcgtacgacaagcggggggcgatcgcgagggtttgggttcgtgaccatggcgacgcaggagggtttcgacagggccctcggccgttgcaacggcgtggagaagcctgatcatcccctttgtacaacggggatcgtctttggctggtgtttgttgcttgtcctgctattgtttttagcttactatgttatcggtggcttttgtaggttggttagcagttggatgtaacttgattcctgttggccaaatcttattgcccacaagtgtgtatatttttacggaatcgttatatttgtggcggcattttttcccctcattacagtcagatttctaatcgttcaattggtttaattttgcgatttgtgcttgacctaaaccgaacccatctcatcatgtccgtaaccagtcccttgtcacgttgacaggcccattaaaatggcgaggccaaaaatttttgaacaatagcatttctcaacttaaaatgtaggtgaagctaaaattacatatataattttgaaacttacattataaatacaccataattatatatgtaattaaggaacttacatatgtaactttgggaattacatgacaatatactaaaattagatatgcaatttatgaactcacaatgtagatgcatactgaccattttttcataaaaaatatggcggcataaatataaattccattacaaattgaaaataaaatcaattccatttcagttttctgatgcaatatgtgagattcaaattttggaatgtcacaagcagacatttagtaattaagcaatggaaacatggttactttccctaatatagtagattaatttccattaaaggattttaagtgtaataaaaagcatttatctcatatgatgaggtaagatgaaatatattgatgagtaggatttcccaaccgacactacgaagacggcattgatgaggactcaaaggtgactggcatctttgaggtatacggtttgcaaaacacaaaaaagccatcgagtcgagccaacacttccgaaccaaaaaaataatataaaaaaaatcccccaccctacggtgctgtggaacaagaggtggagggcacgatagcgctgtggcattgtgaggtaagggtggcgaggacagcgaccatgccatcgtgcaggaggatctgccaggggagctcctgccgatgcctgatccgtcatgggaacggccgctgaagccacatccgctgcgagaaccctcgccgacaccgcatccacccgcttccgacgccgtcgctcacgccgccaccgacactgccggatccatttttgcttgctgtcactatcgactcagccgatcgaaagggaagggggcagaggaggagaggaggaggggataggcttaaggtggagagaaagagggatggcgagagggggcggggagagtagataagccccctctcaccccctttgtgctaaaaaaagaggaacctagctcccggctcggctcggttttcctagatgtcggttttttaatatattacaagtgtcggttggacacctataatatattaaagattcccttttaaaaacaccggtatcaattgtataggtgtcggttcttctccagaaccggcacttatagttgcttaaaggtcttggtttctttaatgtattttcagcccgtggaggtgtgaaaatgtttatatgtgtgccggttttagtacttccggcatctacactgttgacctctatttgcctttatgtagtagtgataggaggaaggcacaatgtattgttctctttactgaaattttgtttacaacagatacttgatacagagccagtacagaatttcggggaaatttaacttaactcgtgatcaagagttatataggccatagtgtgtcgctttaccaaaagtgtgaaatatttcccctgtcccttgtggtaaatttgtacgaacaaatattagactggcgaatggagagtaacccgcaaatagttaaatttcctttttacagtactcctgttaccggtgtctcagaaaaagtgacacctacaggcacgcggcacgccatggcaagtgcaatattgtgatgtcaaaatgcgtactacgtactagtatgtgcaaaggtcgtttgattaaccaggaattcctcgtctgccttaatggtgactcaactctaaaagttctataccaacgaatattattaatttattattataccattacacgccgttgggcgcgactgatgctgttggccaggtgcatttcagcagtaagattcaaggaagagacgacatccttacttcgacaagggagtacaccgaacatggaataatctctgcaaataattaagccgtccatttcaccattggaagtaaagcaaatccaagatatatcctctcaaattaaatcaagtttgtgtcaaggaaatcaatagtttggacaatacgtgtctgcgtgttcgtaacttcgtataaaaatctaccgattaattaacccgtaagctatgctgcggctgcacgggcacatggcacgctacacgattcattaacttaaggtgatccttgttgaattaatccaaagaggctgtagcctatatatatttatctagaccaatcatcccatcatcatctcacaatcatcagaaccaaatccacagctgaatcaaacgcacaccacacagtctacagcggatctgcttgcagagctacatctttcagcgcctactgatcacgacgacagacatggcttcatcgcctcgagctttcgcgttggtgtttttcgcaatcgcggccgtcggctgcactcagctgaccacggccgacgacgcggctccgcccgtgtggcagaaggcgcacgcgacgttctacggcggcgccgacgcgtcgggcaccatgggaggcgggtgcgggtatggcgacctgtactcgcaggggtacggcacgcggaacgcggcgctgagcacggcgctgttcaacgacggcgcgtcgtgcgggcagtgctacaagatcgcctgcgaccggaagagggcgccgcagtggtgcaagcccggcgtcacggtcaccatcaccgccaccaacttctgcccgcccaactgggacctgcccagcgacaatggtggctggtgcaacccgccgcggccgcacttcgacatggcgcagccggcgtgggagaagattggcatctacagcgcgggcatcatcccggttatctaccaaaggtacataaaatataatttgacagcaaaacaaaaatatcattttcggacatattgtacctatgacatgacgatagaacagatttgtaacaattttttgtaatgttttcagggttccatgcataaagaagggtggggtgcggtttaccattaacgggcacgactacttcaatcttgtgctcgtgacaaacgttgcaaccactggttcgatcaagtcaatggacatcatgggatccaactcaaccgactggatgccaatggtgagaaactggggtgcaaactggcactcactatcgtatctcacagggcagacgctctccttcagggtgactaacatggatggccagacgcttgtcttcaagaacattgtgccatctggatggaaatttgggcaaacatttacaagcaagctgcaattcaagtaaccaattcccaaaaattcaagattgggtttctatggcctgtgactgatttgtcatggatatttgcgttgtgtatatatacactgtaaagagtgttggattgtgcttcggtgctcgattgttcacggttgcacaactgatttccattgtttatatatatctgatttattgatgtatatacttatgttcatatccatatgtaggggtgggtacttgcacatgtatatcaagagatgttcatcctcttcattgaatcaaaatatcttcaaatcaatttgtactactctctcatatcaacttgaaccgaacttaaaacataaattaaaaaggaaaaagtacaaattaccctcccgaactatcgtggtcgtccgaattaccccctaaaccataaaaccggacattcttcaccccaactatgtaaaccggacgaattacccccctcaacccaatccacggtggttttggtctatgtggcgtacacgtggcagtccagtcagcattccatttaaaatttttttgtgggacccacctgccatacactcatatatactctctatacctctctctctctcttaccgtctcatggcgggcgaggcggagggcggcgagtgggggcgggcggtcggcggcggcgccaggtgaggtgccggtgggcgagcttgccgccggacacgccgtggaggtaggcgtgcccctgcgccgcgtcctgcgccagcttcaacctcgtctgccactccagtggaacacgcgccggtcctcggttctctgaaagaatccattgccatcgtcatcgtgtagacattgatgagaagaagccatgagaggagtcaggagagagaggttacggaccattgaggaggctgtggaggctgccattggggacgtagtcgaagacgaggaggagctcgtcggccgacgcgtagaaggcgcaaaggctgacgacgttggcgtgccgccacgtgcccatctcccgcgcgagctcccgcttccgccgctcgtcctcccgggtcgtgccttccctccgccgcatcctcttcatcaccaccacctcgccagccttgccctcctcgacgacgccggcgtcgtccacgatgacgtcgtcgcctcccatggccacgtggtacgtcgtcgccgtcgcgcccttgcccagtatctccgcggcgccccgcatgagcgtgcacacgtcgaactccacgcagcagccgtcgaagcgcaccgtctcctcccgcgccatcgagctggtgcgtgagctggcgcgcggcctctccggcttcttgttcttcagccacagtacgccgcagctagagtgccgcggcgaccagcgatgccactgctgcgcccaccgccgccatgatcatcaccaccatccaccggtcattgctcctcctcctccctctcttcggttcgtgtgacgtgtcagcgacgccaccgccgcccaccacccaccccccgtgcgccgcctccgcgtcgtctcccgccgccgcctcgctcgcgcggccgcctcctcatctcgggccgcctaccgcccgcccccgcgcgccacctccgcctcgctcgcgccgccgcccaacgcccgcccccgcgcgccgcctccgccttgctcgcgccgccgccaactgcccgcccctgcacgctgccgccctccgcctcgctcgcgccgccgcccactgcccgcccccgcgcgccgcctccgcctccgcctcgttcgcaccaccgccgactacacgcccctgcgcgccgcctccgcctcgtctcgcgccgccgcccaccgccctcctccgcgcgccgccctccgcctcgctcgtgccctgcctcgccgccgtgagacggtaagagagagagaggaagagagagagagagagtatgaatgtatgacacgtgggtcccacacaatttttttaaatggaatgctgactggattgccacgtgtacgccacgtaaaccaaaaccactgtggattgggtcaaggggggtaattcgtccggtttgcatagttggaggggtgaagaatgtccgattttgtggttcaggggggtaattcggacgaccgcgatagttcgggggggtaattcgtactttttccaattaaaaactatagttcataattaataggaaaacatccgttttaccatccaccggctcttaccttagtccaattcaatcccatcaactctaataacaggaaaaatcatacaactccacaaaattgtcacacagccgtgtgaaccaggcggacaagtgagcctaccacatctggggtcagatgaataataacttgtcaatccttcctccccagtcccaagaggaacaaatgtaggcagaagaggctttgttgtcaaaatcgtcccatgatggtgtcaagagtgtaggttgataaaatttgtgggtgggggatggggggtgttaaaggtgtggagatgatggatgtgtggaaaagcaagattccgctgaaaatcaaacatttcatgtattcagtgggtaccatccatctgctatgcagttggtctataggaaatggaaagggggtgatgagaagtgcaaattgtgtatgaaaagggaaacaactaagcatatcatgtttaactgtccaattgctaatttatcttatgtactgttagggaagcactggagttagataacatccctagggagctgtgtgggtgcatttatgtgttcaaacacaaatttaagtccaaattgtgggtgtttttttttttgttgatgctttgtgctggtctatgtggttaactaagaaagaataggtgtttgaaaatattttggtaaaaatctccattgcaggtggcgtatccttgatgcaaagatggagaattttgctaaaggagggagattgcgctctggtagataaatgaaaagaaatgatcctgaagaaattggggtgtctttgacaagttgttttgcttgaagttttgtaaagttgggtagtgtgtggaaactatattgatccctcgaagggatatcccctcgtttttttcatgtcacttaaatagttataaaaaaatttaaaaaaattaagaagatgtattaacatgtaatatatcacttcacaaacatacaagttcaaattcaatttctgcacctgacagcttccttatgtcacagtcttcgtgtaggtgttgttttttctctatagtcgttgtaggcccgatgatgaccggccacgcatagcggcggctggttttgtggtaggctccccttttagtggcatgtgtttgtgtggtagacgagtagttcctatacacatactttggtacacaataaagctcgatagccttgatgatagtgtttcttgtaactcttttttcttcgatcctaatattgttcggatggcctttcttttgtcatcccgacaataaaaaatacttttccggcgaattatccattgcacgcggttggacacgattacaattgctggccagatgcagaatcacccgtactattaaaggaacagacgccatccctttcttaaacaaggaagtaccggaacatgaataatctctgcaaataattaagccgtccatttcacaatctgaagtcaagcaaattaagagatagtcctctaatcgaatataatcaagcaaaagttcaagcaaagatcgacgaaaaagtacacagataagagaataatatatagtttgggccataatacgtgtctgcgcttacacaaatcgttggattaaaccgcaagccacgctgcggctgcacgggcacgcacatgcatatgcacggctgcacgccacaagcgtcgttaattaactcaaggtgtcatcggtagtccttgttgaattaatccgaaaaaaaaaggctatatatatctagggacctaatcatctcacaatcatctcagatcagttgattagttaatcattagaaccaaaagtgacatatatagctaaatcacacaaccatcttgcagctgcagctttcagagctacaatctttcagcgcctattgataacgtccatggcggatatggctccagctcgagcactcgccttggtgttgctcgcagttgcagtcggcagcgcgttgatggccgcggcccaggatgcgccgtcgccaccgacaccgatggctccgtctccgtctaccgatgaaactccgcccgtgtggctgaaggcgcacgcgacgttctacggcggggcggacgcgtcgggcaccatgggcggggcgtgcggctacgtcgacctgtactcgcaggggtacgggacgcggaacgcggcgctgagcacggcgctgttcaacgacggcgcgtcgtgcgggcagtgctacaagatcgcctgcgaccgcaagagggcgccgcagtggtgcaagcccggcgtcacggtcaccgtcaccgccaccaacttctgcccgcccaactggaacctccccagcgacaacggcggctggtgcaacccgccgcggccgcacttcgacatggcgcagcctgcttgggagaagattggcatctaccgtgctggcatcatcccggtcatgtaccaaaggtatataatttaaactgagaaaaaaaaacatattgtttttgacatatagcacctatggcatattttaagttgtaacatatttggtgatattttcagggttccgtgtgtgaagaagggtggggtgcggtttaccatcaatgggcatgactactttaatcttgtgctcgtgacaaatgttgcaaccactggttcgatcaagtcgatggacatcatgggctccaactcaaccgactggatgccaatggtgaggaactggggtgcaaactggcactcgctgtcgtatctcaccgggcagatgctctccttcagggtgacgaacatggatggccagacactagtctttaggaacattgtgccctctggatggaagttcgggcaaacatttgcaagcaaactgcagttcaagtaatttaattcccggaaagatttgggtttctacggcctgcgactgattggtgatgaacatttgcattgtgtgcaaatgtaaagatacattaattgtaaagattgttgaattgtgtgctttggtgcttggttcactgttgcacatctgatttttattgtttatatttgatttatggatgtatatacttatgttcatatccatatgaacgggtggttacttgtatttaaaaatatctttaaattattttttactactctcgttatcaacttcaacgtaaacttatcaaatcataaataaaaggggaacatccgatttactaggtcagtacatcaggtctgggagactgggagacttgtgagctcattgaggctcggctcatttcagttacgagctcgttttctaatccagccaaaccgagccgagccattttttttttaaaaaaataggactaaggctttacaatttgttagtgaaacttatataaaaattttccctaatgaatgttttcttagtttataggtggaagtttgggtgtgtctagatctcgggtgcctgattctttttttttttgaaaattttagtcatttttatgatccgttagatgaaaatacaatgtttctcatcaatggttaaacaataaagtattgtaataataaatttacaaaattaaatgaaacaaacatataactcataaaaatctacaaaattgtgtgtgttttggattatgcaaaggccataagtatggttctatcaacttaatgtaatcgtctgatattaataaaagctttcctttataaaaaaataaacttggataaaaataaagcataataatatataacaaaaaaaactgcagttaaaataaaggttgcaatgagtaatgctgctattaagacgggtggccgatgaagtttcgtatcaatgtataggtggtgcctaaacacgggaagactgtaaggataaaagggttaatttgatccgtgctattataaatgtctattcagataaataccattataattcgtctatttgtagccgtgccactcgagaaaagagagagatacaagctcctggagatgactcattttgctatttcgctgagcaattctggaaagtttggcagagaccatgtaagggtctgtgttcatggatgctccatcccctgctgcaaaaggttgagtgttttagcttgtgtcaaactcctgctgtgataaacttcacgtttctggtaatagaaaacggaggagggcggcctgccctctcttgctaaaaaaaaccctaaaattgcataatgcacaagcacaacactgtaattttaggtttagtaatatgtactccctctagttctatatttcatattataaatcgtttgactttttttagtcaaacttgattaagtttaacgaagtttatagaaaaatttagtaatatctagaatatcaaattagtttcattagatataacaattaatatattttgataatatatatgcttgttttgtgttgaaactacaactatatttttctataaacttgatcaaatttaattaagttttactaagaaataagtcaaacaatttataatatagaacagagggagtaaattttaggtgcccgaaatatagcaaatatatgcaagtgtttctataggaaaatttacttttatagacaaaactgttgaaaccaccttacgagaaaaacagcgtcaatggaaaaaactgcacaaaatatttttctacgtctaggtatatgtatgcattgtggtttaagcaattatataaaaatttcataaaatttgacaagataaattatgatgatataagataccacacaagtctaatttttgtctacgatatgaagaaaaaaattacaaaatttatttatgttcaacaagtacttttcaccatctgattttattaattgtttctctaattgtaaattaaatttagctttacaggtttgtctttagaattataagatttcaattaatgtaaattttctttgaccgttctaagtcgtatgcaaataatgaataccattgtaccaagtatagaaaatccttgtccgccatggcaaatgggtgcaattgcaaacacgcacctatgttcggattgatgccagtagcaaccaaatattcttcttcggtttggaattactttatctttttagatttagctttgtcctgtcatcaatttatataaaatttaacaataaataaactagtaaaaatatttcccacggtgaataaaaaaaccttatggtgtttaacaatataaatttatggtcaacattagaaatgtttaacttggtacaaatataaaacgataaataatttaaaaatgagagcagatatataaatgaagatatcaaagcatgtaaaccttttacaccctagaatttttcttcttgcagaacatgctgtactcatatctaggtaagttctataatattgttcaatattactcaatacttatacgtgttgcttaggcaggagagaacaagagcagagaaacgtcaaaaggcgttcatttgttatatagtattatctcgcaccaatcaaggaggaaaacagaaagcaatacaagcgcgacatacttacgtctgcggcggccggcggacacacatttcttcggattaattggcgagcaagttatagtagtactgcggctgcgccggccggcgatgcatgcacatgcgcgtcgccgcgcgctagcttcgtcccgtggctttccagagttcacactacttcattattgggatttcattagccactaatgcagcaatccaacaatgaccgagcgatggctatatatacccatccaatcatcaggagatcaccaagcaaacagacatcacatagaagatcaacacaaagcaacagagcagtgttgctttcagagatagatagctccagataattaactcggtcatcaagtctcaagggcctagttacagagttatccgatcatgacgacagacatggccccagctcgagcgttcgtgttggtgctgctcgcagtcgccagtgcatcgacggccgcggccaacacagcgacgacgacgcccacaaacccggtggctgcgccgacccagtggcagaaggcgcacgcgacgttctacggcggcgcggacgcgtcgggcaccatgggcggggcgtgcggatacggcaacctgtactcgcaggggtacggcacgcggaacgcggcgctgagcacggcgctgttcaacgacggcgcgtcgtgcgggcagtgctacaagatcgcctgcgaccgcaagagggcgccgcagtggtgcaagcccggcgtcaccgttaccatcaccgccaccaatttctgcccgcccaactggaaccttcccagtgataatggtggctggtgcaacccaccacggccgcactttgacatggcacagccggcctgggagaagatcggcgtctacagcgcaggcatcataccggtcatctatcaaaggtaccaatacaaatactccaattattttggacattatggagagaacagtgcatatcctgaccgctgcttccatatgaaaatatcctactcttgcgatgatttctacagggttccttgcgtgaagaagggtggcctgcggttcaccattaacggtcacgactacttccagctagtactggtgaccaacgtcgcggcggcagggtcaatcaagtccatggaggttatgggttccaacacagcggattggatgccgatggcacgtaactggggcgcccaatggcactcactggcctacctcaccggtcaaggtctatcctttagggtcaccaacacagatgaccaaacgctcgtcttcaccaacgtcgtgccaccaggatggaagtttggccagacatttgcaagcaagctgcagttcaagtgagaggagaagcctgaattgataccggagcgtttcttttgggagtaacatctctggttgcctagcaaacatatgattgtatataagtttcgttgtgcgtttattctttcggtgtgtaaaataacatacatgctttcctgatattttcttgtatatatgtacacacacacgacaaatccttccatttctattattattgaacaatttaattgcgagggcgagtacttgtctgtttaccttttttttttcagatggcattttatagtttaacctttcatggaccggcagtagttctaaccatgaatgaaaagaaatcatagtccacaccacgcagggacattgtggtcattttagacaagacgatttgattaatgtcttgtatgatatggtcgacagtgaggactaacaaacatatggcatattttattaccggcgagttaaataaatttatgtcacagtaataaactgcctaataaatgcacgccagaaaatataatgataaaaaaaagaaaagatacataagtccattgcttctacttttttaaaaattaaatccaacattttctattttttggtataaacttggaagtactagttggatatgcaaaatcatctaacctccatatatttcatcaatttgtttactttacatatgggagaggatagtatgtcaaagaaaatgacaacaagcttacaagtttcttattttaaaagttccgctaacttatcaagcatagtgtgccacgcaaaactgacaacaaaccaacaaatttaaggagcgcctaacttatcatctatgacataccgcacaaaatgataacatactagagaaactttattgcacaaaaggaaatttatccataaggcaaaggaacatcttaaggctttggatatacatttaccaacaagcattgtttgtattacccctaaagcgcaagacatgtcatccatgagtcatagtgtgtatatctcaacattgcaaagctaccttttttctattatacttttcgcattataggctagatattatctatacatgtcaacaaactctatccctacgtcatatctgaagattcttttcttcactatataagttggcttccctgtcattgaactcacatcaaccagcccaagtttccaataacatcctcaaatagctatggcgaccatagctttctctcggttatctatctacttttgtgttcttctcctatgccatggctctatggcccagctatttggtccgaacgtaaatccatggcacaaccctcggcaaggaggttttagggagtgtagatttgatagactacaagcatttgaaccacttcggagagtgaggtcagaagccggggttacagagtactttgatgagaagaatgaacaattccagtgcacaggtacatttgtcatccgacgtgtcattgagcctcaaggccttctggtacctcgatacagcaatactcctggcatggtctacatcatccaaggtttgtatagcggaatacattgttcatatgggtacaaattatgattctccatgttacaataatgtcgttttaggttatatccacctgacatggacatttctaactttcagggagaggttctatgggattaactttccccggctgcccagcaacctaccaacaacaattccaacaattcttgcctgaaggccaaagccagagccaaaaatttagggatgagcaccaaaagatccaccaatttagacaaggagatatcgttgcactgccagctggtgttgcgcattggttctacaatgaaggcgatgcaccagttgttgctctatatgtcttcgacttaaacaacaacgctaatcagcttgaaccaaggcagaaggtaactaaatttcttcaccatttttgtttctcattgtcatatatatgaatatgttgcagttcatgtggcaaaactttatcattgattcccactgataaaaattttaggagttcttattggcgggtaacaacaacagggagcaacaaatgtatggtcgctcaatcgagcaacactctgggcaaaacatatttagcggtttcaacaatgagctactaagtgaggccttaggcgtcaatgcattggtagcaaagaggctacaaggccaaaacgaccaaagaggagagatcatacgggtaaagaatggccttaaactgttgagacctgcttttgcacaacaacaggaacaagcacaacagcaggaacaagcacaagctcaataccaagttcagtacagtgaagaacaacaaccatctacgcgttgcaacggtttagatgagaacttctgcacaatcaaggcaaggttgaacatcgaaaatcctagccatgctgatacttacaacccacgtgctggaaggatcacacgtctcaacagtcagaagttccccattcttaaccttgtacaattgagtgctactagagtaaatctataccaggtatttatcaaagtggagttttgttcactctccatctctgtcccccctatatttctataaaaatagttttatctgtgccaccatttatatataacattgttctctactctctacagaatgctattctctctccgttttggaacgttaatgcccatagcctggtgtatatcgttcaagggcatgctcgagttcaggtcgttagtaaccttggaaagacggtattcaatggcgttctacgtccaggtcaattgctgatcattccgcaacactacgttgtcttgaagaaagcagagcatgaaggatgccaatacatttcattcaagaccaatgcaaactccatggtgagccaccttgcagggaagaactcaatattccgtgccatgccagtggatgtgatcgctaatgcttaccgcatatcgagggagcaagcacgaagccttaagaataataggggagaagagctcggtgccttcactcctagatatcaacaacagacctacctaggcttctcaaatgagtcggagaacgaggcctcagagtgatgtactaatgaaatagtataggtgtatcaaaaaaaaataaaatgccacaagtatgtgaaactttgtggcggttctgttctaagtttatgaagcactaataaaatgctacaactgttttattcatgcaatttttgctacaggacatcgtgacttcgcgattttagctgtaggacactacgcgaagtgacttttgggaaaagacactacgtaaagatggaaattagctcgtggacaacgcgcctattcgaatattcatctttaattgaattggtgagagaaaccacatgaaaatattaaaatacccctggtcccaaatgccaagtcttgcatctctctctgtctatctctctcacacagaagcgtctcaactagcatgttgtactaccgggaggtctgccgcctgcacaaggatgggaggaggcagagcaccttgaccacctggtccatgaaactcaaaatcacattacctgcatgggctgccgctactaagcaatcaactgtggactcataaacacttgaaccaaatgcatgatccgcagtccccaattcgacaaccccaaagcgacattcccaacactgatgagaaacgatttagaagacgacccatccgacgacgaagacactatcgccgccctaccagggagaaagctcgacgggatccgtggtcaacccgcctagatccaggccagcgccatggatggaccccaccccaccaccaccgatgcggccgacgagatcgggacccctatctagctcactccctcgaggcggccgcaggagcgatctctcaccaggagtcgcgtcgggaggaggagggatgccgctctacactatcgacgcccttcagtgctagagagatacaaatagagagatgaaagagctgacttgtgggctcaggggtattttagtactttcatgcaatttctccctcctatccaactaaaaatgaatattccaatgcgcgcggtctccacgagctaatttccacatttacagagtgctttcccccaaaactcacttcgtgcagtgtcctacagctaaaaccgtaaagtcgcgatgtcctatagcaaaattttcctcgattcatttgttctatcaatatagatgagaccgtgttatggcagtttacataaaaagattggggcaattccaaatttaccactcctttgaatcgttattacgagactgtcactagaaaattgcaaaaataccactagaactatcattcgagtggcatccttgcaaaattaaaaaaaccggtggcaaatttgcaaatgccccaaaaagatttgcccataccagatacatctcaaagaagatttgatgcaaagtataacttgttaatgctatattttaatctcggaattattataaacagaaaaagaaatgcttattatctaaaaggaaaatatggcgtgtttcccctaaaaaaaaggaaaatatggcatgtggcctagttacgtaataacatataaggaccgattccttggagaatcttatccaagcatcttataatgtgaccatatgaatatttgattcccctggctaagttatatgacaatagttgtgtgtttgtctgggacacttgtgtaaggaaggaagacgatagcccttgaatacctagaatttttttaggggcccccttgagtacccgaagtcttgcatatatattgactagatgtgtatatatattgggtacattgtggatggggaaaataggtatagacctaggcaacaaaattggagaggctttaggatgttgctgggctttaacgggactaatcgtagtcgtttgtctcgatgagcctatgtgtttatacctcctaggtcctccatgttcatcttgggcttgtagggataaagagaaaaaaaggcagatttttttattttttaaacttttaaaattttcaattatgaaaataaaccctttcaacacgtaattccaagaaccgaaccttttggccacgccagccaaattgccttagcaaaaccgcaaaataacactgtcacaacagtctggctagcgcggcagcgttatttggtcatgctggtctagctagtgtggcattgttatttttagttccagctagaagaagtcctactcggacataacttgatcggctaccttacagaaaaataaacaagtccgattcaaacaaaatttgattggctcaagactccatctatagaaaatgaagctaaaaagaaacgtttcctaatacggaggctaaaataaaataactctaaacttgatacactttccaactgaatcaaatataattacatcattagtcactccattgacccgatcttgactaacagtagttactaaattttgccgctaacaggctggtattccttatttgtttggtgctgtaccggtttgaggataaccttctagtacaacaataggtaatatatgcgtgaaatagtgtttcctaggagtggggcatgccatattttacacactgaccaccattctatatgcatatatgtaacaaatatatgatatacctctaacatggaaatcggttatatatatacaattagttgacaagtttggaacatacactttccatgttagatctgctggtttcatctttattgttataccggacatgccattttgattttttttatgttttaaacttttttacttttaaattttaaaaatagacccttccaaaatttattactagaacttgaaccttttggccatgccaccccgtctggcatggcaaaacaatactgacacgccacacacaatgggcgtgacaattttgtcctaccatgccagcaagggtggcatggccaaatatcattgacacgccagccagaccaatgtgaccaaaaaacaatggcacaccaactagactagtatgaccaaataacgttgccacgctagccagaccggtgtgacagtgttgtcttgtggttttgccatgcaaattcggctggcgtggccaaaaggttcggatctaggaattatgtgttgaaaggacttattttcaaaattaaaaattttaaaagtttttttaaaaaaatcttcatttttttgctttgtccctacaagcccaagataaacatggagaacctaggaggtataaacacataggctcatcaacaaaaatgactatgactagtcccgttaaagcccagcaacatcctaaagcctctccaattttgttggctaggtctatacctatttttcccatccacaatgtacccaatatatatacacatctagtcaacatatacacaagactttgggctattactcaagggggggcccaaaaccaattctaggaattcaagggctatcttcctcccttgcacaagtgtcccaagacaaacacacaattattgttatataacctagccaggggaatcaaatattcatatggtcacattataagatgcttggataagattctccaaggaatcggtccttatatgttattacggaactaggccgcacgccatattttccttttacataataagcatttctttatctcttcataataattctgagattaaaatatagcattgacaagttatacctggcaccgaatctgctttgagatctatctactatgggcaaatcttttatgtaaactaccaaaacatggtctcacctatattgacacaacaaatgaacaaaacagttgtagcattttattagtgcttcataaacttagaacagaaccgccacaaagtttcacatacttgtggcattatttttttgatacacctatactatttcattagtacatcactctaaggcctcgttctccgactcatttgagaagcctgggtaggtctgttgttgatatctaggagtgaaggcaccgagctcttctcccctattattcttaaggcttcgtgcttgctccctcgatatgcggtaagcattagcgatcacatccactggcatggcacggaatattgagttcttccctgcaaggtggctcaccatggagtttgcattggtcttgaatgaaatgtattggcatccttcatgctctgctttcttcaagacaacgtagtgttgtggaatgatcagcaattgacctggacgtagaacgccattgaataccgtctttccaaggttactaacgacctgaactcgagcatgcccttgaacgatatacaccaggctatgggcattaacgttccaaaacggagagagaatagcattctgtagagagtagagaacaatattatatataaatggtggcacagataaaactatttttatagaaatataggggggagagagatggagagtgaacaaaactccactttgataaatacctggtatagatttactctagtagcactcaattgtacaaggttaagaatggggaacttctgactgttgagacgtgtgatccttccagcacgtgggttgtaagtatcagcatggctaggattttcgatgttcaaccttgccttgattgtgcagaagttctcatctaaaccgttgcaacgcgtagatggttgttgttcttcactgtactgaacttggtattgagcttgtgcttgttcctgctgttgtgcttgttcctgttgttgtgcaaaagcaggtctcaacagtttaaggccattctttacccgtatgatctctcctctttggtcgttttggccttgtagcctctttgctaccaatgcattgacgcctaaggcctcacttagtagctcattgttgaaaccgctaaatatgttttgcccagagtgttgctcgattgagcgaccatacatttgttgctccctgttgttgttacccgccaataagaactcctaaaatttttatcagtgggaatcaatgataaagttttgccacatgaactgcaacatattcatatatatgacaatgagaaacaaaaatggtgaagaaatttagttaccttctgccttggttcaagctgattagcgttgttgtttaagtcgaagacatatagagcaacaactggtgcatcgccttcattgtagaaccaatgcgcaacaccagctggcagtgcaacgatatctccttgtctaaattggtggatcttttggtgctcatccctaaatttttggctctggctttggccttcaggcaagaattgttggaattgttgttggtaggttgctgggcagccggggaaagttaatcccatagaacctctccctgaaagttagaaatgtccatgtcaggtggatataacctaaaacgacattattgtaacatggagaatcataatttgtacccatatgaacaatgtattccgctatacaaaccttggatgatgtagaccatgccaggagtattgctgtatcgaggtaccagaaggccttgaggctcaatgacacgtcggatgacaaatgtacctgtgcactggaattgttcattcttctcatcaaagtactctgtaaccccggcttctgacctcactctccgaagtggttcaaatgcttgtagtctatcaaatctacactccctaaaacctccttgccgagggttgtgccatggatttacgttcggaccaaatagctgggccatagagccatggcataggagaagaacacaaaagtagatagataaccgagagaaagctatggtcgccatagctatttgaggatgttattggaaacttgggctggttgatgtgagttcaatgacagggaagccaacttatatagtgaagaaaagaatcttcagatatgacgtagggatagagtttgttgacatgtatagataatatctagcctataatgcgaaaagtataatagaaaaaaggtagctttgcaatgttgagatatacacactatgactcatggatgacatgtcttgcgctttaggggtaatacaaacaatgcttgttggtaaatgtatatccaaagccttaagatgttcctttgccttatggataaatttccttttgtgcaataaagtttctctagtatgttatcattttgtgcggtatgtcatagatgataagttaggcgctccttaaatttgttggtttgttgtcagttttgcgtggcacactatgcttgataagttagcggaacttttaaaataagaaacttgtaagcttgttgtcattttctttgacatactatcctctcccatatgtaaagtaaacaaattgatgaaatatatggaggttagatgattttgcatatccaactagtacttccaagtttataccaaaaaatagaaaatgttggatttaatttttaaaaaagtagaagcaatggacttatgtatcttttcttttttttatcattatattttctggcgtgcatttattaggcagtttattactgtgacataaatttatttaactcgccggtaataaaatatgccatatgtttgttagtcctcactgtcgaccatatcatacaagacattaatcaaatcgtcttgtctaaaatgaccacaatgtccctgcgtggtgtggactatgatttcttttcattcatggttagaactactgccggtccatgaaaggttaaactataaaatgccatctgaaaaaaaaaaggtaaacagacaagtactcgccctcgcaattaaattgttcaataataatagaaatggaaggatttgtcgtgtgtgtgtacatatatacaagaaaatatcaggaaagcatgtatgttattttacacaccgaaagaataaacgcacaacgaaacttatatacaatcatatgtttgctaggcaaccagagatgttactcccaaaagaaacgctccggtatcaattcaggcttctcctctcacttgaactgcagcttgcttgcaaatgtctggccaaacttccatcctggtggcacgacgttggtgaagacgagcgtttggtcatctgtgttggtgaccctaaaggatagaccttgaccggtgaggtaggccagtgagtgccattgggcgccccagttacgtgccatcggcatccaatccgctgtgttggaacccataacctccatggacttgattgaccctgccgccgcgacgttggtcaccagtactagctggaagtagtcgtgaccgttaatggtgaaccgcaggccacccttcttcacgcaaggaaccctgtagaaatcatcgcaagagtaggatattttcatatggaagcagcggtcaggatatgcactgttctctccataatgtccaaaataattggagtatttgtattggtacctttgatagatgaccggtatgatgcctgcgctgtagacgccgatcttctcccaggccggctgtgccatgtcaaagtgcggccgtggtgggttgcaccagccaccattatcactgggaaggttccagttgggcgggcagaaattggtggcggtgatggtaacggtgacgccgggcttgcaccactgcggcgccctcttgcggtcgcaggcgatcttgtagcactgcccgcacgacgcgccgtcgttgaacagcgccgtgctcagcgccgcgttccgcgtgccgtacccctgcgagtacaggttgccgtatccgcacgccccgcccatggtgcccgacgcgtccgcgccgccgtagaacgtcgcgtgcgccttctgccactgggtcggcgcagccaccgggtttgtgggcgtcgtcgtcgctgtgttggccgcggccgtcgatgcactggcgactgcgagcagcaccaacacgaacgctcgagctggggccatgtctgtcgtcatgatcggataactctgtaactaggcccttgagacttgatgaccgagttaattatctggagctatctatctctgaaagcaacactgctctgttgctttgtgttgatcttctatgtgatgtctgtttgcttggtgatctcctgatgattggatgggtatatatagccatcgctcggtcattgttggattgctgcattagtggctaatgaaatcccaataatgaagtagtgtgaactctggaaagccacgggacgaagctagcgcgcggcgacgcgcatgtgcatgcatcgccggccggcgcagccgcagtactactataacttgctcgccaattaatccgaagaaattttcggtttttccctgattggcgcagaatgacgcaaaacacaagcgcggcgacgtccaggctcccgcaatcgcaagcaagcgcatgaaggcaacgttcaacggcggcgccatgaagaatggggtggcgtgtgttgtgtgtggccggcgatcgagtgaggcatctctgaagtctgaactgaagcatctcgagtgttttggactcgtttcttttcctggtgacgttatgaggtgtttttttttccggggagacgttttgatgaggtgttgatcagaattcatcaccttgttagaatgtcaacaagaacaattgacggaagaaacaaataatcgttttaaaagttgacaaaatcatcgagggaaaaaacgttttcaattagacaaaacaattgacgaaattccgttgtcaagtaaacaaaacaatccacggaaaagacaatctatctatgatatactgaaaatctattaaaattcctacaaacacactaaaaccgtcacgtgtattcctagtttcgtacaaatacttctaaactgtcacatgacactttaacaaaccagtggacctgatatttttatctattagaatttttttttaaaaaaaaccaaaacaagtagtcacgtatttgatggggcccacccttccaccgggcgtactcacgtacgtgcttcctccctccccctcctatccaatctccttttttaaattattaacatttttgaacattaacaaatcttagataaccacaattttcctatagttatttgtgttctttaacaattaaaaaaattaaaaaaattaaggtgttctttaacctataagaaatatttaatttttatcatatccaaaactttacatatcactttaaactgttatgtaaaatagggaaaatttgataatgctgattatatgatcaattcgccaaatatgcataaataaattaagttagatctattatctctattattaaaaaattgaatatgtttttgccggtactttggtacgttatccgtgcacgagtcggtttttaagtttgttctttttggaaatacggatccatatttgagtcggtttttaagttcgtttacttttgtaaatatagaacaaatcgtataataaatctctttaaaaaaactcacgtgctaactcgaactcctaattacaactcaatatatagggcttttcttacgtatcacttctatgtccacttttcttatgtatcaactagttgggtggcccgcgcaattgcgcggctagcacctaaaaaaaatcatatatttttcagtatgattttacttaaaatttattaaatagctattacgttgtcttaagactttgaaaagccaaatcttatcatccctgtatttctaattatatagttttttaaaagtcacaccagctactaccccttacttctgtcatatttcttttatttgcttgcttgatctaccactatttctattcattctccttaaaacctttaaaaatcagatcttatagtttttataatttctagaagtcccatcaaacgctgtcattatactcctctacaggtcatcaactgtcttttctctatattgtcattgggattttacaaatcgaacataattatcgttcgggttcattttttactttctaaagtcccgctaaaccgtcagcggctttgccattgttttcctttatggcacgcccgctgcctcacttctttatcgtcattgagattttaaaatcgaatatgattatcattatgttttttttacttttagaagttccaaacctttaaaaattagacctcgtagtttttagagtttatagtcttgttggtttcattttttataatttttagaagtcccgttaaacgatgtcactatactcctctatggcccatctgccgcctactctctattgtcattgggattctaaaaatcgaacataactatcgttagaatttattttttattttctagaagtcccgccaaccgtcggtggctctcctatatatcccgcccgctgcttctcctttttattatcattgagattttaaaaatcgaatatgattagcattggtttttttttttactttctagaagtcccggcaaccgccttgatcgattgcttcacggcctacccgtcgtccttcatttcaatcgttattaggattctatttggtgttttattaacagttattgcatgtcgtatcaaccaccaccactctactcctttataggcgtgttacttaattaatctcgtcatgtgttttagatggtattttctttcaatagtcttgattttttatcaccaattttagttatttataaatggtattcctagtatttttctttttttaatttcagaatttattttatttttcgtattgtgttcttttgatatttttattttttattttcaattttagttgcttccaaattgtattcctactttaactctctttttaattcgcctaatttcggattttattttattttttatctcgaattttaattaatctactattaggttgttttatgtactcttatttgcagcgctgcttatatttaatttcgaatttaagttaattttaaattgcattccgaactcttcttttgtttttttctaattttgattttttttaattttttattccgaattttaattaatcttgtattggattcttatatatactcttattttaatatttcttatttttaattccgaatttcagttatttttaaattgtattcctactcaaactccccttttttctttttataatttctaaatttattttttattcctaattttaattaatcacgtattgggttcttatatggactcctctttcaatattgcatatttttaattccgaatttcagctatttttgattttatttctatttggactcttctttttttttctccgattaatgtgggaatttctagcctctacagcaaacgtggttatgtatttttggcttggttatatatttattggcatgaaaatactgatacaattcggaaacggcagagtttgattaggattgttttgtctttcaatgtttctaaaagtggtgttaacacgcgtattcccaaaatattgtccgtttccaatatgattatgtttttcttttcttttgttttttttttgtttttgaccgattgtacattacgtttccagtagattaggttttcccttttttgtttgtttgtttcttttttttgacagattgtccgattccgtttccagtagtatgattaggttttccttttcttttttgtttttgactgattgtccgattcgagtttcttcatacgccttatttctttctttcttcagtttttaactaatcctaatctagttctattttttttcttattttttagattaatgtgagaatttctaggccatgagagcgaacgtagaggcttctttttctattattttaaagatataactagcatggtggcccgcgcagattgtgcggctagcatcattatattttctctcatattatatcatatatgttttctcattatattattcaaatatattaaaatgacaacataattttaaattttgcaataactttacaaaactactaatgtgtaatattcatattgtattttatatacgtgttagttattaattatttttaatatcaaatcctatatggactctagtctcgtcttttaatatattttttagttccgaattttctgtaaattgtatttctatatagactctatactcttgtttcaatattattctatttatttttatttctaaattttaattatttctaattgtatttctatgtggactctaaactcatctttcaatattctttaatttttaatttcgaatttcagttatctctaaattgtattcctatattgactttaaactcttcttcccatgtttttctaaatttcgaattttagttatttgtaaattgtatttttatacggactctaaactctacttttaattttattatgtttattccaaattttagttagttttaaattcctatagggactctatactctacttcaaatattgcttattttttaattccaaatttctatttttttcttaattgtatttcactctacttctaatattccttatttttaattccaaatttccattattttcctagctaattgtatttctatatggactctatactctacttctaatattgcttatttttaattccgaatttcagttatttcctaattgtatttctatatggactctatactctacttttaatattccttatttttaattctaaatttcagttattttctaattgtatttctatatggactctagtctcctcttctaatattccttattttttaattctgaatttcagttatttcctaattgtatttctatgtggactctagtctcctcttctaatattccttaaattgtatttctatatggactctgctttttctttttctcctattaatgtgagaatttctaggccatgagagcaaacgtggaggctcctttttctattcttttaataatataatagtgtcggtgacatgggaccgggagtatcatgacttagagacttgaggcagacacgatcacccacgtggcctaaccccctcgggggggggggggggggttgggcccgagggtgatacggccgcccttctctttgtctccccgaggggtcggaccgctcctgtctcggccccgagggccgatgcgccccgattccttgtgggttttgcgccgcgtatatggggtaggtgagcatagcggggctcacctaaccacatttattgcggtttggacgagcgcgtcacgccgcatgtaacgcagtcacagaccgatcagatcgtgggttaggtggcgacaggcggtctgacgcacgcctcgccccatcccgtcaggatgagagcctccaagcactcgtccctagccggagccggcgtgttagctcctggagatggcacgttggttccggtcagatatatgccaggcttcatcctaaccattacaggcaagatattgtatgaagaagggcgaacatgcagattgttaaactgacacgtggtggacaagaatgaccgatttgtgaccggtctgacaatggtcatgtcgtcagcagacagccatgttcccacgtcgcgcctgcttccggcggaagtggaggtaggtatgggccgtcccatgagaaggtcattcggacggcagccatacaaatctccgtccattaatgaagagaagtgaagttggagggaagagaggatgagtccccacacaaaagaaagaaagggagagatggtgcatgtggtatccccttgagatataaaaggaggaccttgcccacttagaaggaaaaaaacgatcccagaacgatcgggggctggctcgcactttgtagcttcttcatacacagatccaccaaaacacaggagtagggtattacgcttctcagcggcccgaacctatatacatcgcccgtgtcttgtgtgtttccactctcgcgaactttccacaggctaggagcttagaacctcacccagggcccccggccgaaccggcaaagggaggcctgcgcggtctcccggtgaggagccccaagctccgtcaaatagatagattatatatgtcacattcaaacctatgtatcatttctacttataattaaactgctattcactaatcattgagtcaggaatattgatgagatgattgtttattaaattgactattcgagattcggtaaatctatgctgtcaagtggtaaagaagaaagttaacttgcaatatagattaaacacaaacaacagaataggtcaatctcatgaaataaaataaagcagcatcgtaacttttttaaattgaaaaaacatgtatatgacaatatgaaaaaaattgaaaaaaatccataacatacaccctacatataatcaaagataatcacggctaatctcattggaatataacctatgtatttattgaatcattaaagcatataatcaattggagaaattattagatttaaaattcatccaagtgtgttaacaaattgaaaaaaaatatttgagttatttcacctgtagtagcaagatatcgtagggtgctcaacattgttgctaacgaggaaggaaaattactatgatacccgcttattaagtaagtgttaatttgattcgtgccattgaaaaatgcctattcagataaatatcattacaatttgtctattcatagctgtccactcaaattttacaaaattagagtgccatcgtcgttacgttttctatcttcctcctcatctacacgtgggacccacctgtcagattcatcatctttctttcactctcgcttatcttcttccttccccatcgatctctctgtcacggtgaggagcgaccaacgtgggcaagacgggagggggtcagtcacggcgtacattaaatgaacggtggttggatagaacaattgtactttagattcacttatattatgggaaaaaattgaatctatggtagacaagaaaaaatgttatttaatgtaaaaaatatgctaaatattaacaaaagaaagatacatagtgcaaatgtatatagtataatttatagaaaccaactcaattgttgtgacaccatatactttctcataaattcaaaactatacggattgatgtaattttagtttagaatttatatgttgcatgggtaactacaagaaaatcataactactttctctgtttcataatgtaagtcattctagcattttccacattcatatggatgttaatgaatctagataaatatatatgtctagattcattaacatcaatataaatgtgggaaatactagaataacttccattgtgaaacggagggagtgacattcaaagtaatccctagcaaattagaatatagtcaaaaagtatttcaataataatcacccacaaataaacgttggtaataaaattttaaacacattaaataagatgcccacgcatgtgtgtgtgctacctttctagtttaaaggaaatcgtcgtagcgccaaaaaagacaattcaaaagaaatcgtcgtagcaccaaaaatgaattaaaggaaatcgctccaaaaataaactaaaggaaatcatgacaaaagaatcgacccaatttaaaagaaatcatcgtagagccaataatgaactaaaggaaatcgcgccaaaaaatgaattgaagaaatcgtgacaaaacaatcgacccgaaaattcgacccaatttaaaagatattgtcgtaacgccaaaaaatgaattaaagtaaatcgtgacaaaacaatcgaccaaaaaagtcgtagcgccaaaaattgaattaatggaaatcttgacaaaacaatcgacccaaaaattcaaccgaatttaaaagaaatcgttgtagcgccaaaaatgaattaaacaaaatcgtcgtagcgccaaaaaatgaattaaaggaaatcgcgccaaaaaatcaatttaaaagaaatcgtcgtagcgccaaaaatgaattaaatgaaactgcgccaaaaaatgaattaaatgaaattgagccaaaaaaaaggattaaatgaaattgcgtagcgccaaaaattatggaaaaaattatcagagccaggtttcgatcctgggacctgtgggttatgggcccaccacgcttccgctgcgccactctgattagaaaactcgtaacaatttggtattgctttgtccaatatattttgtgtattcagccttcaatgttttctaaatcccttttttgctagttgtatgggggtaccgactaaaatttcggtaattttgatcctaaattatttgaatattttaacacaatggctaaattcataaaaaatgaaaaataaaaaaaagttcgggttaaataatttcgtacttgggaatggggggtgggctgatagacccgaaattttgcaagagtatagaatatagaacgagattaattacaacggaatgactgtacgtacgactgtgtctgtatgacctgcatacgactgcacataacagattttaacttgttttgattgggcccacgtgaatatttatgaactcatgtgattggttggtttggtgcagtcgtatgagagtcgtatggctcagtcggatgtatagtactactctaattacaatgctttgtaccattgaacatttgatgtggataaaataagtcacataattattattttacaagggttcatgtgccatttctattaatgaaaaacaagattaaggtgtaattgctcactatgaatgcgtcagaaatcgtccccaccagcaattccgtctgaaaatacagagatcaaacgaaatgggtgtatacatgggtcatcttgaccgctcatccaaatcatgcacatgatgttgccaaacatgaatactccttgaaaccacgcgattcatctgttgaataaaagggacaggtccgatttaattcaattaaattccctaggcctataattaatgttagtgataataataccatcttaaaaattttagtggagagatctcatcttaaatagagagacaattatgactctctattgaccggttgagaaggtgggcggactaccacgtgcgcgcgcacgcgttggctgggccgaggccgtggcttccgtcgtccctagctttgatctcttacgtgcaaaagagattgggacgagtagagcctccgaaactctgtccgtctgagttcctgcacgggtaggcgggcaataaagtttttgcggagcgttcttccgtctgagttcctgggtctgagttcctggttcctattcatcaacgccaacatgtcgacagacgacaacgccaacggtgcagctggaggagatgtcagcaatggaggaggcggtgcagggaacggctccatcaacggaggcaactatgcctcacactccagcgaaggaccatttttagagtatgtctctattcccaacacgctaatttctgatatactactattaagcgtaatgtttttataacaatgccatgtgatgaatgtttatgcttattctatattaagcatgatttgtatgttgctcttgattagtattcacactagtttattccctaaaaatgtcatgcttattgtcttaatgatttggattaaaatatgccaaattgcgaccatatttccaacatcatctttgcctcagagtcacatggctggtatgcttccttgtgtgaacaattcttgtgacaaatctgttgaacgtggacacacagcaggcgcctcacttgttacaatgcatagttgtgctagcaatcgttttagctgctgtgttatgctaggagagctcatctgccattccaccccatcttttagttgtgctaaggcttggtggcctagtaaatccgacgtttccctctactgattataggcccgcgttgcaactgtttttcttatttagtttagtgaaattattcagagaggtgacctgttcggttttctacaccatggtcggttttatgagaaatctattttcaggatgaacagtttttacggaaaggaagaattttttacgtgaaagtgggggagagagggataggaggatgactccctctcttataagatatttacaattttatataactttagttgaagttgatacaagtgtaataaaaattaatctgaatatgttttgattcaatgaagagcataaacatctttgtatatacaagtacccacccatacatatgggataaagacataaatatatacaccaataaatcaggtataaacaataaaaaataaaaaataaaaaaaatcatatgtgcaatagtgcacagaagcacaattcaatagtccttacaacgtgtatatatacactgtgcaaatgtccatcataaataatcagtcaggcagtagaaacccaatcaattcaggatgatcacttgaactgcagtttgcttgcaaatgtttgcccgaacttccatcctgacggcacaatgtttctgaagacaagcgtctggccgtccatgttggtcaccctaaaggaaagcatctgtccagtgagatacgataacgagtgccaatttgcaccccagtttctcaccattggcagccagtcggttgagttggagcccatcacatccatcgacttgatcaagccggtggttgcaacgttggtcacaagaacgagattgaagtagtcatgcccgttgatggtgaaccgcacaccacccttctttacacatggaaccctgaaaaacatcacaaaatacatgttacaaatatgtcttatatattgtcatataggtgtgcaatatcaaaaacaaatacgatttgtgtttgtccggtgtaggttaattatgtacctttggtagatgacggggatgatgccggcacggtaaataccgatcttctcccaggccggctgcgccatatcgaagtgcggccgtggagggttgcaccagccgccgttgtcgctggggaggtcccagttgggcgggcagaagttggtggcggtgatggtgaccgtgacgccgggcctgcaccactgcggtgccctcttgcggtcgcaggcgatcttgtagcactgcccgcacgacgcgccgtcgttgaacagcgccgtgctcagcgccgcgttccgcgtcccatacccctgcgagtaaaggtcgccgtagccgcacgcgcctcccatggtgcccgacgcgtccgcgccgccgtagaacgtcgcgtgcgccttcagccacacgggcggagccgcgtcgtcggtcgatgacgacggagccatcgctgtcgtcgtcgtcgccgtcgcattggccgagtcgtcggccgccgtcagcagaacgaagccgaccgtgactgcgagaaacagcaacgcgaaaggtcgagctggagccatttctgtcgtcgtggtcagtaggcgtttgctgaaagttgtagctcgctagctctgaaattaagctgcagctgcaaagcagagatgctgtagactgtggtgtgcgtgcgatttagctgtgaatttggttctgatgattgtgagatgattcgtgggatgattggtctagatatatatagcctgttcggattaattctacaaggatcgccatgcgtgcatgtgcccgtgcagccgcagcatggcttatgggttaatcggaagatttgtaaatgaagttacgaacacgcagacacgtattgtccattatcttagaaaaaagacacgtattgtccaaactactgatctgcttggcataaaattgatttaatttcagaagatacctctcttggtttgctttacttctaatggtgaaatggacggctcaattattaatttgcagaaagtattcaatgttcggggtactcccttgtctaagaaacgatgtcatctgttccttgaaacttacaggtgatactgcacctggccagcaacatcaatcgcgctcgaccaacggcgtgtagtggttaattggatggaaactaatttttagagttgactcatcattaaggcagatatgaagagtagctaaattaagacgaatattcctggttaatcaaacgatcttggacatcacaatattgcacagccatggccgtgcccgtaggtgccactcttttgcttagacaccgattagagtagtactctatccatttcagtttataagactttgactggtcaaagtcaaactgtttcaaatttaataaaatttatagacaaatataataatatttataatattaaattagtttcatcaaatcaataattgaatatattttcataatattttttcttgggttgaaaatgttactactttttctataaacttgatcaaatttatcaaagtcaaaatgttaacctgaaacggagggaatagtataaaaggacatgtttactgaccctgtgtcaagcactcttgttacagaatttcggtaaagagaataatatagtgtgccttcctccaaattttattttacggattttatgtccaaagttagcaattccgttacatatagtctgtaacgctccgcttttcgtgaggcgttaaaaactaattcggcaaaatcctaattgcgaaaattttcgttctttgtgtgcgagtctaagttgtgccaatatctcaattcaaatcccgttgttccctctcatcgaaatcgaaatcctccacctcaaatttccaatcccgattcaagtcaccgagatcaaatcccgaaattcaattcctctctttgaattctcgccaaatacttgtaccgactcgaaagatatccaaattccattcccaatccaaattctctccaactcaaattctaagcaaaagtctaatttgcatccctcgggttcgtgggccgaatcccctccctaggcccatctctcccctctgcccttctctctcacgtgcgctgcacgtggtcactcagcagagctgagggaggaagagagctcccgcctctctgccttttctccccctctccgttcactctctctctccccggcgccgattcccgccgacgccgctcaaatccgcaccgccttcgctcgttcctgcgcgctcgcgcgtggctgaccgcccggttgccgccgcgtcagccctgacgccgcctgtccccgcgcctgcgccgcgcagccgcccggccccgctcgcctttagccgtcatcgccgctgtcatcgctcggccccgatgcccccatgccgcatccttccaaaaccaagagacagagctcgtgctcctctccctcgttctctctccctccttcctccttcctcccaaagtggcaagggagccaagctcttttccctccccttttcgcctttttccccgaccacaaccgctgtcaccacctgccgctccttgaccgcaagcgccgcgccagccgagcaagcttgaccaccaatgtcggtttccctcctccaaaccgacctctcctcctcgcctataaagcccgcgccctcccctctcgtttcgtcttcacctcgctcgaaccacccgcgccattgttgccagccgccagctgctcgcccccgcgactgcctcctcgctgccgcgctgtgtcaatggccgcgtgagcctcggcgtcggcctcgtcaagctcggtgccgcactgccgtggccaagagcgtgtgcatgcacacatcatcctttcggcctcgttgcctccctcctttgcccggccgcgccctctcggtgccgcgcctccccgccgtcgcgaccgcctcgtcacgactccctctgcgtcgccaacgccgctcctccctccccggtgagctccccaccgtattcctcctcctgccgcacaatgcgccgcgtgcctcgccgttgctctgtttcagccgccgcgcgcagtcgcgcgccgtcgtcgggccccagctcatcgaccaccctcaccaacaccgtccttgagctccctagggcctccccaaaccgttccctagcaatgccgtcacctggcatggcttcgccaccattaccgtccgctcccgtaggccgccgtcgacgctagccctcctcgatgctcctccaccctatccggcgccggaaacggaatccccgactcccagagatactcccaccaccttgaatttaatccttgtcgcccctccgccgtttcccctttttctcgccgccagcgtgcgtcgccgcaatccgccgcctccggcctctttccggcgaatccaagccgtcggctctcttcctctcgtcccttccctccttcccggtgtgctccctttttccactgaggtcgtgccttgctccggtgaactcggccgccgtccgccgttcattcccggcctccccttcttcctcctcccgttggctcgcgtggcagccacgtcggagccacgtcggctgcgactgggtcagccgcctcctcccttccccaccttcgcgcgcacggtccacggtgcgccaaccggctgcatgtgggcccgctgccatccgatccacccggcgcaccgcccgcacaccgcacccaccaaaccctagcaccgcacccgcgtgcgctctccccaccatgaaccttgccgccaacatgtgggccccacccgggaccccgcgaggtgcacccggtccaccggaccgctccctcccccttccgcgcgccctaatgggccgcctttcccgcgcccgcgccggcccaaatggcttggccgagcctccttcgacccttgggccgcgcccttgccgctcgaaaaagtctaatatatatccctccatccttttctttttcagggatttaataaatcctttttcctttgtcccataaatcaattccttgttccaaaattccataaaccatttctcgtattccagaaaattccgataaatcatttccttgaccagaaaatccaaattaaacttccaaaattcatatcacccaattcgcaactccgattgactccgttcaacttccagtaattccgtaaaattgagatctatttaatggcactactaattagtctaaataggatctttcttttggtccttgtttaggttttcgattgtttgcgtatagttgcggttatcggattttcgtcgatcgcgggttttctcgaagattcgtgaagcttcgtgaagactttgagcaaggcaagtcaccctttgatcaattgcccctataattgaaaagtcattattattttgtttacaacttgcattattagactcacacacttaacttgcttggcctcggtttgcgtgccaaaccgacggacctacccagtagtcgcactaatttccgtaggtcgtactaccctgattccttgtcgctccacccttgtggtacctcggtattcgtgctctctgagcgcgtataccaaataccccacatacaccgttgtttgtcgaaaacttgggaaatgggtttgtgaagccttcaaaacccgacatgtggtgtcggtgtgtttgaaaataaaatgaattgtgaaaactcgcgatgcgggggttgtgcctatgtggcactgtcccgtattcgcatataaggaccgattcctgtgggaaactcatcgaacataatcaaagtgcaaccacaaggtggaatgggacaccctggctaagtagctagtcggttcagggaaacctcgcatgccaatagttgggaacgccggggcggggtcggttggagccaaaccgggttcctggtaatgcaagaacgagaagcttgctgaattaccggtcgaggtggttggagtttgatttgtgaacgcctaaaatggcctatgtttacgtgaggatttgatccttctatgtggcatgaggtatccctgggtcggcttgggaaaggctttgtcgcgaacctctgacaccggccagtgtctggagtaagttcgtgtcttgtgggtaaagtgtacccctctgcagaggttaactaactgttcgaacagccgtgcccacggtcatgggcggatgtgaggtggttcccgttccgtagatttgtttgcctgtgctttgtgaaaagttgttgtggtgtgggaatcgtaaccagaatcagcctatgtggcagatggatgacctgagtggtcagaaacgaatctgtgtgattcgggatgtctgtgggcatcatagactaggcttcccgagtggaagcggattgttgtgctgctgggcagctggactctgggagtccgagaaaatgaaaaaggctctgggagccgattaatcaagtggaatggctctgggagccgagaagtaatgatctgacccgggaggtcggtacattaccaattgagttgttgaaaagcatctcttaaagtcgaatcgagacgcaagtctctcttcggcccaaacttagaaagaaataaatcacttagtgatttcaaaatgtcttcaaataaaagatttgcaaaacaaccttgcctctcttccaagcttgcattaaacacccaagttcccgtgacttgctgagtacgaaagtactcacccttgctctatataaatatatatatagctcctccgccctgaagagaagataaagtgaagtgaagattagggtttcgtcctggttcccagccgtcgcctgtggtgtcgggtgttaaaccgttggttccgctgctgctgctgttgttggtgttcgcctcgtccgtgtcgtcggttgcattctcgggctgtctgagctgcaacctaagttaaggtaaataagtcctctatttattttaaggatttgcaatgattcatatttgtcaccgtgggtaccagcactatgtcctgggactggtactgagatcgcggtttcgtaggaagcggttcgcgccgtttttcctacgacacgctcctatcaggtgccgttgtgcggcggtgccggattggggtgtgacaagaggggtgagggtgtaacatcccggcctaaggcttaataagattaatagaatactcatatcaacaagttgcaacttcttttccggaagccaatctccaaagaactccagggttaaacgtgcttggcctggagcaatttgggatgggtgaccgaccgggaacccgggtgcacatgagtgaggacaaagtgtgcagaaaagatatgtgttggtctgtgagggcagtctatgacctatgaaagctatcagatgaatgacctatgaaagtgttggtctgtgagggcagtctatgacctatgaaagctatcagatgtaagtgggcccggcctgggggaggcgggacgttacatagtccctgatcggacgtatttcgtcttacctcatcctatgtggcaaatgcctttttattactctttaattagatcctttaatggcaattaatccattatattaagaaaactaaccgtgtttccatccctaggttactaaatgtctgctggcgaaattccaaattttgaattttccataattcatcataagaatacagaactgattttattatttttattttcaatttattgtggaatttattattagattgagtttgagaaaattctttatacatctcttaaatttcaaccaatcccttgtatgttcatgagttttgctcggtctgttatatatcatctaattttagttttgaattttttatgcccatacctatagttgaccatttaattcatttgaaaatatccatttcgctcttagaaatggaagaaacatataaatttttttaagtatattgttggaagtataagtttattgtacaagactactatatttgtgattttatttttttgtgcgaggtactattcacggcaaagtttatatttcagataatgataaaaaataattttatttttttaattgatataagtgggagagaaaaatagatcgagtaatgaaaaccagcaagcctagaagatacaacagctaatcaacatacaaaagttagcgaaagtatagtaagctaaagacgatagcaagcaggacaagcaaacaaaagccaatgacgattttcgtcggagaaagatgaccggtttctccacggcgttgcaacgaccgagggccctgtagaaaccctcctgcgtcgccatggtcacgaacccaaaccctcgcgatctcccccgcttgtcgtacacgaccctcgcctgcaccaccttcccgtgctcgctgtacatctctcgcagccggagtctatccacctgcggcgacagatcgccggcgtatatcctcagctcccggcggcggcgccgccgtcttgccggagctgctgctgcttcttcttctaccttgatccaatcaatgttgggctcaggcaagaaccacatgcacctctcgtcgttccatccggcgggcagcgtttccaccagcgtcgtcgtcgtcgccggcgagccggagctgtccacgaagctgcacctgtacacgcggcacggctccgacctgacgacgaagtaggcgctgccgccgggcacgtcgccgctgaaccgcgcggcctccacggcgaagctgcccgggtatcccaggaagaggacgtggtcaccgaggacatcgtccctcttctcccacaccggcacggcagctggctcgtcgtcgtccacggctgcacccagcacccggatcgagcgcgtgcacagctgcgtccacatcgaacgcgtgcacggacaccgagaggcggtcgtcgtcgtcctcgtcctgtagaacgctggccagcagcagctcgccgcgaagctccaggaggtagctgcgtcgtcggcgcaccttgccgggctcgtcaggtagacaaatagccgtgttcctcagccatagcgaatccttcttgtggatgtaacagtgcgccaacgtcggctacacgcttctctcccgaaatcgctaataagcgactagttgcgcgcgcgcgcgagttcacctcctactacttctactttctagcccaacattttatctgactgttttctgggcctctggtgggctttcccctctccacccggagggtttcctttttcttttcttttttgccgtttctcttcttttttttcttcgttctctttccgttttggttttcttcggttttttttcagtttcttttccttttttcggttctctttctgatttggttttttcctttttttcggtttctcttctttttttggtttttttaatatgtacttgtacaaagtttatatttgtaggtataccaattttcatatttatacgtatacaaattttgtattcatgttttttctctcggtttttaatatgtacatatacaaagtttgcatacgcgtatacaaagtttgcatacgcgtatacaaagttcgcatataaaaaatatacatgtatacaaactttgcatacgcgtatgcaaactttctatacgcgtatacaaactttgtattttgtatacgcgtatgcaaagtttgtatacatgtatattttttatgtcaattttttggtacacataaaaattatatacacgtatgtatatactttgtatacacacgtcacacacatatatatataggaaaatgcagatttgcactcgggttcacatgtacctacaatctacaccgttgatgtgttccaagattcgtgctgcaaaatgtacctaaccttaaccaaatgaatgcctcctatagggagaaaagattaggattatgttggttcataatatgtataacatgtatgttgcattttttaccaaatattttttttaataacaatcatatatgacatttatatatccagtgcatcgtatttctctaacccttattttgtttataacatgatatttagttaatatgagaaaacaatatatctactatatcaccaaattgtcatattgcaaaaatgatatttccaaaatgatatatatcctactatcaaaaactacataaacaaggtaatttatataaacaaggtaaactacataaacaaattttgcatacaagaaatataaaaattacataaacaaggtattttacactatatagtataacgtaaacatcatgcatggtatattttgttaccacctaatatgcttgtcctaagattcgtgcaagctatatatagggtatagattgtggttacacgtgaactcgcgtgcaaaaaaatccaactcaatatatacatacatacatacatacatacatacatacatacatacatacatacatacatacatacatacatacatacatacatacatacatacatacatatatatatatatcactcggttcatatgtacctacaatctacactgttgatgtgttccaagattcgtgctgcaaaatgtacctaaccttaaccaaatgaatgcttactatagggagaaaagataattaggattaggttggttcacaatatgtataacatgtatgttgcattttttaccaaataaaattttcaataataattatatatgacatttatatatctagtgcattgtatttctctaacccttattttgtttataacatgatatttagtcaaaatgagaaaacaatatatctactatatcaccaaattgtcgtattgcaaaaatgatatttccaaaatgatatatatcctaccatcaaaaactacataaacaagataatttatataaacaaggtattttacacttgtaaaaaatatagtataacgtaaatatcatgcatgttacattttgttagcacctaatatatatacttaccctaagattcgtgcaagatacatatagggtgtagattgtgggtacatgtgaactcgcgtgaaaaaaatccaactcatatatatatatatatatatatatatatatatatatatatatatatatatatatatatatatataggacactcatatggggcaccatggtgcccgggcaccatggtttcaaatgcacaaaatcactcaaatttttcaaaattttcaaattgtgagtatatacctagttataagaattcgattcatacctatacctatcaacaaaacaactcaaatttaactttatttcacaatccatgattacatacctaactaattatatgtatggatgctatatacctagaatcaaaatctaacaaaaacaagttcaaattcagttcaaacttgctttcaactagttagtaaagtagttaatattaatacctaaataattgaaaaagtttcatgctcatttgaattgggtatatactcaatttcaacaatggtgcccgggcaccatggagcaccaaacaaatttactatatatatatatatatatatatatatatatatatatatatatatatatatattagtatagacaagaggatatagtagtatacagactagaggaaagcagctgctcgcgtggcgttggaaagagttaggagaaagcccacatgcacgcattggactggagcctggaaaaaggaagtgaaggcccacacgcgcgctggaaaagaaagggaaggcccacgcgcgcggcaaggtgcatgtattccgtttatgtcgtcttgcccgcgcgcgcctcccggcgcgcgttcagtcgcgcaatagcgacgcccctcctctcccctttttcctccccttcttctcttcctactataccataaaatttttaaaaaataaaaataataaagttagaaaaatttatgtatagaattacttatatataaaaaatatttgaattcaaattcaaatttgaatcggatatataaacttttgacataaaaactttgggtcgataaactttaggtgtataaactttaaatatatagaaatactatatataaaaatatttgaatcagatatataaacttttgacttataaactttgggtctctaaaatttaggtctataaattttaggtgtataaactttagatatatagaaatactatatataaaaatatttgaattcaaatttaaatttgaatcggatatataaacctttgacttataaactttgggtctctaaactttaggtatataaattttagatgtgtaaacttgaggtgtttaaattttaggtgtaaaaatttactaaaataagaaagtaatacggtgtaaaaaataaaaaaaaagaaatcatgtgggggagagggaccgatcgctaccgagcgatcgcttgttaggactttcggcatgctaacggaaatggttggttaaacgattgattgctcccgcacgagtgcacgatacattatgacaccacattgtgctcaaatttgaggatcgaaatctatggtatgatatttctgtctaatggagaagggataaaaatatcatctcgagttggtcgttcactacatccgacacttcatcagcagcaacatgtggtgtctctcactaaaaacaatattcctatacatgaacctctttagattgcaaatggccagtaactcgtcacgtttaaaaaaaaactttctctattttcgtgtgcgggttcctaagagggctgcaccgaaaaatcgattttcaaaaacaggcctcttaagtggactgcacgcaaaaaatacaattttttttatctcactttaaaattttcaattcttctcttttcctttcccttttattactccctactctctctctcctctcctcttctcccatccaagtgtgcggcgcgcgggaggcggccggctcgcggccgggggcgggcgggaggcggcgcggtgactagcgaccggcagccaggcatcgtggccaggagcgggcgacgcgcggctcgggaccgtgcgcgacagctggatccaagccgcccctaccgccctcgacgacgacgaggagaggaggcggcctggagcggccccgcaatggtcctatccgccgccgttgttgcgacgcctggatccgccgccgacaatgacggcgaggaggaggtggccgggagcggggcgcagcgctgccgacaatgaggaggaggcgaccgggagcggcgccaccctccccacgcgcggcggtggcggatctggcagtagtgagacacggtgaccgtcgcacgcgcagatacgacgatggccgccctcctccgcacggtggtggcggatcagacggggggaggcgcgacagcagccaatccggtggtggggaggcatgggggtggcggatctggctctggcgacggcgatgagagcaggtggacccagcgacggtgaccacgaggagggcggcggcgacaggttctaggggcagggtttcgggttttttttttattttattttttcggttttttattttggcgacataagcaccgtcacacaaaaatagtgatttttccggaccctttggagcatgcggctagccataccacacgcgaaaaccctttcttgccgcacggaaaaattgttttttagtagtgtcttgctctccatgcttacttcaacatctgtagtggtacatgaatcctctacggattagatgagaatgcgcccatgaactctaattgaacatcttcttatttgtgcagtccacacatcgacacataatatatttgctcatcctaatttttctgtcattatccgcaaaatttatgaattcagtgactccctcctatactctgggatcaaaaggtgaatatcggacatccatcaaaaggtgaatatcggacatccaacttcttttttgagaattacacagtacatatcttcgaagactgggccggcaaatcctcctggagattgatgaagtctccacaggcgcctcgctatacgtcgcctaccattgaaagacgaagtctccacaggcgcctcgctatcgatgggtacgtcgcctaccattgaaagcacaatgttgttaaatcctaaaaaattcgctcccatgggagtcgaactcaggatctaaagtgctattgagactcttataaccactaggctatatgcccttttacatcgtacatccaactttggtccatctacggtcaataatataaaacttctcttttcctggtgactttgtgttcagaattcagaatcgtgtttttttttccttttttgctgtgggagaatacagaatctttttagaatgtcaaccaaaacaatttactgaaaaaaatatgaataatctttttttataaggaaagaaaaaaatatttattttgctgtgggagaatttaaatattattagaatgtcaaccaaaacaattcacataaagaaatgaatattttttagaaggaaataaaaaatatattatcagagccaggtttcgatcctgggacctgtgggttatgggcccaccacgcttccgctgcgccactctgatcgttatgctcagaggcataacaaaatataattagtacttgtttgtaacaatgcaattttgtctgttaaaaggccaatatgtggaaataacggtttagtatattatgagtgtgttcactgccatgtgtagcaatcagacacgaagcacacggttgtataaacaaatgcatgctaagcaatttttaagaaagcacagtagagaaggcttccacggtatatatattaaataaaacgtaaatctagatcgagaagccactcgtttgtgacgcgccttagagctatccgaccccgtgtaggcatatatgcgcatagcatgaggggaaaaaagagagaagtgctactacacatctacacgttcatgtcttgtttgttattatatcatacatgccatttttccttctaataaaattatctcttaattacttatttgatctataatccgacaataccaatgtgttcgttgtaattaaatgtttataacaagatcttacatgattatattatgataaaaaaatatttatgtttgcaaattacttttattatatatgtatgttacttttatcatatatataaattactttaagatttgattaaattacttcttatacattcataatgcttgttgattactttttattattgtttttagtcaattccataatttgtgcagattaaatttaatttcttgatagactcatgtttttatccctacaacagattcacttctattgttgtagcaactcagttccattttgtgctaagttacttttttgattactttcaaactttattaaacttactttcataaatgtatttacataaaaatcttctctacactttgcttgtgaatttactccccagtttcttactacaactcagtaataatgtaattgcctctaatgttatatagagttacttctagtgcatatctaagttacttctataatttaaataaattacttttatattaataaaatgtttgaatatattcgacatggatctcgttttgtcacatattttgaatagagtacaatgatgtaaatagatcgtaaaaataatatgtgatttaaaagatataagtcactaaagaaagatttatatataggatggagtggtctccggttaggactaattcactactgtgcactatctagtcacatcctaaataaaaggtttatatacgaaaattaaaacgataacaaaacaaaagcaagacataacaaattacaaatattcaatccatgattgcaccaatggacgatgagaatccttgagcctaggtaaatgtaggctcaaatctaattttaaacttctctcccaagagagaacatcaggctacaaaccattaagaatcaagctatttctctccttccagatattccaggcagccaagagcagaagttctatgaaacaagaataggaaaaggaagcactctaggattgaatcatttgattaaattcatgtgtactgatccaattccaccccagctgactccaacaaagagaactaaaatcacatgaaaagaagagatgttctcgagtttccgtaccattgtggaggcaacaagaacaataaaacagttgcatgggctggaacacaatgttttctatctaaaagatcccttgtattaactttgtccatggctaagcaaatggttatataaactttggaatgaagagggagattggaaaacttgctaaggaggtacctatcaaagaaaattttgactcatgtagagaaaaaaaatcaaggtattatcatttctggtcggtactcatgatggttaaaaacatctccggatcattaaagtgcacggtgggactcaggttagagtctaggaggatcaatggaacgggaatactctctttgctgcttgttacccagccttgtataactttgtgataaacaagaatgaatcagtggcaagggtcatgagtaaaagacctctataggagggctatagtgggacataatttaaaagcttggttggaagtggtctcaaaggttatatcaataaaattgaccgagcaaaatgatacatttttgtgggaggcaatgggcgtttctcagttaacttaatgtacaaagcaatcatgtatagggaagccattcctaaaaaggacatgatttggaaactcagaataccactaaaaattaaaaaattattgtggtaattaaagactggagtaattttaacaaaggatgatttagtcaaaaggaagtggaagggtagtgttaggtgttgtttttgtgattctaacaaatcaattcaacaccttttgtttgattgtattttggcaagattcatgtggaatgcagtctttatatcttttggagttcatccgcctaggaatgttgctaatcttttcagcaatttgctaaatggggttcaacccaagctaagagctcaaatccttgtggggatcgcagctttgtgttgggtggtttggctatgccagaatgatacagtctttaatagctccaatactaattttttttgttacaggtgattttcaaggggactttttggacaaggcaatagtctttgctacttaaggaggaagatagccaaaaaatgagagaatattgcttgatgttggagaagagagtttctggcttttcgcaatgaaggggtcaaacttagaaaatgattgggagaataatactctcttgttttgttgtgtggttcggttgaaactcgtattaactttttaagaattgttattgctagagcctagttgcttgacatgttgttaaaccttttgtaagagagtgagtctatgtactcctataagttttgttggggctgtgtacatctttttggatgtagagaccggtttaatcaattatctaaaaatcaacagtacacggtgctctttaatatggatgtatataaagataatcaggctgccttccaacctgcatatattgctgtttgtttagagtgaagctgctgatttgtttctatactatcttacctggtattggataaggtatattgtaaattatatggttgctacgtactccctctgttaaaaaaaaactaatctagtatcggctgtgacatgtccaaattcatagtactagaatatgtcacatccgatcctagattcattttttatgagatggagggagtactccgtctggataaacatgtcgcacccaaacaactctgaattgaaaatccgtactatactacctccatcccataaaaaatcaacctcgtactggatataacacatcctaatataatgattctaaatatgtcgctgtctagattcgttgcattaaagtctacattcgttttttttaagattcgttgcattaaagtcctacattcgttttctttaagacggatggagtatgcatgtgacactactaattgcattttatttcttaggccaggtttagttcccaattttttcttcaaacttcaaactttttcatcacatcgaaactttcttatacacgtaaacttctaacttttttctttaaactttcaattttaatcaaacttctaaatttggcgtggaactaaacacacccttagcttcttcctgagcaggagtaacatcaatacacgtcacactgaatgtgcccatccgtggaatctaaggaaaaaagaatatcattattcttcaacgagagagcagttgcatgactgaaacatattcttttttatattacactaccatacctaatcataggcaatacacaagctctggaagtcttgattaccaacaagtccgcaaacaaactatagacatgcaaggctgcgaacagataaccaattaaccccacctaacaaccatgtcgaagaacttgactggaacaatattaaccaacatatattaagctttcaagtcaaatgcacgttggtcataggtagtcatttcgttcatgcgtacaacattcaggccacaaatctcgtactgtcatacacaaacacatgcacttaaccatgtcattagtaagccagtggcaactggaaaagatttttcagacaatcagaactagaactccctcttaaccaaataaatgaagcgaataaactgtgtcatctaaaccgtcaggacaaactctacctcatgaagctccaacctaaggaacgaagttcacacgcgcgcatttgaatggagtgacagcttaagtgcgtgcacagcgtgattttgcattcccagccaggagaactgtacattctactattggatcctacccttgtacttacagaaaccagtaaacacgggattacaagcgaaatctgggcacacgtaggagggttatcttagcttcgactagatctcatcctgctccattggttctgctccgtttccactatggatagaacttgaggcattgacatgcctcctgaaacgacaatctctgcaacaccacgaaacaaggcaattaccaaagctattcaaagttgaagggatgaaaattcatttagcttagaaatagaagatgcgcataccgatgccttcacgaacagataagtttggtctaatcacatcacttgagttgaccagaaatatgtccccaatgtagagatggttggttggtacatatacacagtacatttgttcctcactggaataatcctggcgtaaggaagtaaacgcgtatcaatattttgtccagacggttagttagccaaaagtatgcaactaagaaatgctagtgcaaaaccctaatacatagaagagcacatgaacatccatgaaaaatattcaaatgcaacatatcaactaatgcagctgcactgcctgtgctaacaactaaggaagctccacatatttggacaacaaaacaaataaattttaactcattcacagataaattgtttcagcaaataaattgactagcagttaactcgttcacagattaacagtttagctcagaatgagtatcacatttttttttagtttgtaaagttacttataatactggtatgagaaaaaatgtatggagaactggccaggcacctgtctatttctaaggctgtgtaccgtggctttgtttagttccaaactttttcttcaaactaccaacttttccatcacatcaaaactttcctacacataaacttccaacttttccatcacatcgttccaatttcaaccaaacttccaattttgacgtgaactaaacacaccctgtgttcttcccccaactttcccaactcatctccatcgttttccgcgcgcacgcttttcaaactactaaacggtgtgttttgcaaaaattttctatacaaaagttgttttaaaacaatcatattaatccatttttcaaaaaaattaatacttaattaattatgtgctaatgagtcgctccattatccatgcggagggaatgaattcccaacacaaggaaacgaacgcaccctaagtgcttttcctaggccaatccgaaatttaaaacattggcactcagcatgggatgttaatatcaagattgggaaaggtcacttgttttaggaaaaaatagaaataaacaccctgcaccaataatttccattataattagcaagattaactatcctgcaattaccatatcttcattatgttcttccactttcactaacaacctcttccccttctatattcatacctgtttctgctatttcaaaaaaccaggtgctactgtgctactactgcactaattaccacagggcaccctcaaaaccatcactgatacttaagtcatgcctaaatagaagtcaaacctcctgctgtcaggtgtgaacatcacacagctatccaccatgcatagaatcactaaaccgctagttacagtagcacgtgctcaatcattatgttggaccactatcacttcagttgattagctgcatgcatgcatatctcataatttgttagccaattttgttagttgctttcgtctgtttgtgcaaagttcgatgactggcaaaagggtccatgatgttatcagtggcagctactttaaacaaaatgtaaacagatcaccaaaacttggtgaaacaatctcaatacagtgataacacacacaaatataatgcatgaacaataactatgatactaggaaatgaagagagaacaattgaattataatagctagcaccactcaaacctgaagtagaacttccgaagtgatgaatccaaatgcatattcgccaattctgggatgccttataatgaccacttccttgaatgcatgtttgttctgatctgcatgaaaaaccaaattagcgattgacaattaaattgtggtttatggaatcacattaaggtggagaatataaccaggtgaaatggcagcactgatctgcttggatgcattgtaaatatggcgaacaaatggcattctctttataaaccactctcccagaccgagaatagatgcccccagccaagatgacatgaacacaccaaccacaaaaatgaatgatattgaagttacaaaaccaagtcctgcaaatagtgtgaaaatcgtcaacttcagaatcgagtggaaatccattataaaccatgagaaaccacagtagaaagaaggcacacacaactacagaagagtgggtacccagaacaacctatgaacaaagttggcagacgatgcacaataagtaggttatgatctttgaaaattttgctatgatatctagttatatactctttatttcataagagtacagaggttggaaagcaagtttgaggaaaagcttcagtcaaacctacatctaattttaagggcagaactttttttttttaacaaaagaagagggtgtgggtttgtgcataaatagcattgaaaggtccgcctgattctttaagaacaagaagcaattgcatcacaaaatacttcctctgtcccagaatgctggacgttcaaggatggttgagccaaattagttgtgactgaaaatggccattttgcccctaatttatgagattagagctaatcatgtggatgcttgagtagtactagtacactgccacatctgctatttcatggcttgagtagttctagtacactgccacatatgctactttatggattaaactaatgcaaccagtccaatcaattcaaaacttttcactttctttatggatgcttttctaggagtctgtaactgtgtgctgttggggaagtgcagcgtcaacaaatatgggacatttgcttgtgagcagaacgacctcctttgtgggacggagggagtatgaggtaaacataaatgtatggaattaagttgagaacagtaatgaagaaagaacaacatatccaattaagtatatgggaataaacaaaaaaaaaatgaagctttatagctcatctaaattataatttgaatgtcatagacacatagcaatcataggacaattagctgttcaaaaaacaacataagactatcaacacaagataaaagctaaggagtgatgtctactaatatcatctgtgtaaagcaaaatacagacagtcagacagaggaaagaagtaatgactaattagatgggacaggcattatgcgaatatacgtgataatgtgaataaaggtcttaagcgtaatggcaatagtagcctatatgctaatgatattttggtgcatacacaaatttatggtacatatgtatttgtgataactcaaaagaaaagtccagtgacttggaagaacctacaaactacaaatgaaagcaaatattgctggagttggtaaggaataaagtaaacaagagtagttctccaatactaaaaagaaaaacatatttctaataggattataattctcttgatcaactaagtagtaatctggactgacaatcatacaatagttcaagtactgtgcataccaaatatattgattccaagatgagcatatattggggagaaaaacccatccacaaagcgaaagaaccaccatgtgatatagaatgtaactgcaattggaaagaggattacactgaaacagaagggagaaaatcccattagcaaatgagaaatacaggaaaaactttacaatgaaatctccaatgttagtattaagtttttatttaagtacacaaaactgcaataacatttgcaatatggcaaataatagctaaaatagtacactatttactgcttttaaaattatttcacttagattctcatgcccccagagatattttaccaaagcatagtagaaataaaagaaacgaagaaagtatccatgctataattgcaaacaaccaaatagaaacttagattccatgctggcagtctggcactacgattgaactgttgttttcctttctgtagccaaaagaccaattattatgataggcaattctattcatgctatttttatattgagtccgtgatacatcccttatgagagagatatttcaacaaatataaagaaaaaaaattgaatttatgggataaattgcatgagattaggaaatgaagtgaagacttcatggattaattaaattcaatctttaacttatttgactccttttctctccaaatagaccaagttcatgaaaggatagactaaagtccctcttatcagattgagatctgcaatcatttatgataaacatccaatccatttcatcatgttcatttataatctgcatctatcagatcatctgactggagaaatgcgactgtgcaccataatggtatcaattcagtttctgtcattcttgcaaaaccaaaaaattcagaaagaactagcgtatattttactttcatttatacttcaagaaaggatggatatgactggttgggaaacacattgagcagctcaactagtacagtgaacagcacataagggcaatcaggttcaaggggtctgaacaccaagatatgcttgaattaagacaaggtaaaatattacaattaaatttaaagtgggaaaatgaaattctaaatgaaattctgtaaagtttttccaaggtcctaactcctaacatcactatcaaagtatcaactgctgtcagcaagaaaaacatgtgtgtcaccacggtgcaaatttcgcaatgctggctgtcaaaacttttgcggttgagctacagtctcaattggcataattgagaccccaactcccaatgctctaatcaagacggcaacaccattggcattatacactataagtaaaatagcaacatcatcaccaaactgaacacgagtaaggcatgcatccagactcaattctgcggatcccaatctaacagcaaaaccaacatgcccacaagtttgaagcttgttcgttttgtgtcccaaaacttagacatctaagcttaaagagaaaatttttccgacgccacgaaactcccgtggtaatccaccggtccaatttcggatccaaattctgaaccacgaaagcaaaaatcctccaaaatcgaggagcacaaaaacaggcgacgtaccatccggtcatgaacttcttggacgcccagctatgcacaaccttgtgaaacgcctgaaaatcaacaaaaccacaaagaaaaggcgtcacatttcgaaacacgcattacagcttcgccacgccctccagatcaaatctggctcgatgctacaaaaaaaaaaaagattccgtggaggaaagggtgccggacctcacggccggtctgcgcggcggcggcggcggcggaggcggaggaaggcttggactcgtcgtcggagtcggagtcgcggcccgcggccgaggcggaggcggaggcggaggtggcgacggcggcgggcgggacgagcagcagctcgcggtcccggtcgcggtcgcggtcgcgcgcgggcatcgggatgtgcaccgccgagggcttcgcgtcgcccatcgccatcctcgccctcgccgagcagctctcctccagctacctctccctctctggcttggcttgtttgtgtttgggaatttcttgtttcttgctgcgcctcgccctcgatgtttgctaggcggtccatggtattggacatttttttggtctaaaccaatgacattttcgtgaattcattttttttcttaatattttgagctgagctgtttcatggtttcacaaaaaaagataaataattaggtccgtcgtgtataggagtataaagaccggtatgggctaccagcttacgggtccatgtgtcaagagagattatagtccatttttttgtttgattatatattatttaatagagtaaaatacaccggcggttcttaaacttgtcaggaggtttcacttaggtccacgaacttgcaaagcgcacatcgagatatctaaacttggtttattgtatcatctaggtccaaagccgcgtagaccgtgcttttgcctacgtggcacgccacgtgcacgatgacatgaaatttttttatttttttctcccttcttccttcttttttctctttcttccttcttttttctcgatggtgagaggcggcacgaggggatgggctgtcacggtggtgcttggcaaggcgccggctgaccggcgcggcggaggcggggaagccgacgtgaggaggccatggccggggtcggaggcgagcttgcggcagcggcgagcgcgcgggggcggtgttgatgggaggaggacagcggcggcgatgccgaaccaccgcacaccatgggcgccgccactgccgcggtttcgccgagccaccgtgccggaggcgagcgcgcgacgggagggagacagcggcgctgacgggagggagggggacggcggtgactcagggaggaggacggcggcgctgacgggagggagggggacgacggcgactgggggaggaggacgaccgcgccgacacaccgctgtcgcgttggccacgtcgtcgcgagccggccgcctcgcatgcgaccgcccgcgccacggccgctgtcccgagctcccccgtgccggcctttcccttccatcgccgcctcccgtttccgcccgagccgagacgacgccgccgccgagctttcttctcctctccacagccaccagctcctctctcatcgccaccccgagctcccccatgccggcctctcccttccattgccgccgcccgtttccgcccgagccaagacgacgacgccgtcgcgagctttcctctcctctccacagccgtcagctcctctctcaccgctgcctctctcttgcgctgccgctaggtcgccgaccccggccatggcctcctcgcgccggtcgggcgccgcctctccccaccttcttaggatctcaaccggaaaaaaaagtaggaagaaagagaaaaaaagaaggaagaagggagagaaaaataaaaaaaattccatgtcatcgtccacgtggcgtgcgcggctttggaccgggatgatacaataaactaaatttagggacctcgatgtgcgctttgcaagttcatggacctaagtgaaaccttctaacaagtttaaggaccgctggtgcattttactatatttaatactaaaagaattacaactctaatctttttctttcatgtttggttatatattaaacaataatataaatcacaatattattttatgaaaaaagaaaagaaaagaaagagtcaatccattctatgccatcgacaaagcacggcgcgggttctacaatatgtcattgataaagctcagttctacaatatatcttcgaacaactcatttttttccttatatgccatcagcattagtaaattgttagtcatacgccattaagggaggaaaaatgtcaattttacccccctaggataaaattgagattttgcacaatgccatgtctcattaaataatcttggatgataaaaagacaagtgatttttatttttcatcagtgagaagaaatagtgggttgtaaccaatgaaatccatgagtgcgcatgataccctaggggcaaaatggatgttttcttcctcttaacggaatttgactaactattcactagcggtgatggcatgtaaggaagaaaactatttgttcgatggtatattatagaactgagctttgtcagtggtacattgtaaaatccatgccttgtcaatggcatagaatgaattatctaaaaaaaagactacccaatgcagactaatgagtcttcgtatttaatttcaccaacgagcgcagtaacgtgttagaaacttgattgggccgcacacgtgtttgggattgtgatgtttctaaacaagcctaagcaagcacaaggagagcaatacatctatatatttgcagcagcaacaacaagtttaggaggcatcgaaacagaagagaataggcagcaatagcttggttaaggtaacttggcaaacgatagtggcatgctagtcctagccaggaacattcgttatctcctttcctacctctcctcccgccttcaatccttttcttagtttgtaggagtagaaccttttagagttgtatctcctttcttcttattgctcttgaatttcacttcaaccattcgattgtgcttgtgatttgtattgaaaaaggttactgatatttaagctgagagaagatatcccaaacaaactagtagagagacaccaatccctaccgagttcgccaagcaagctactatggcaaagtgaggatatggatttacttttcaggtggatggagtccgagcagaggcaagtggagacatatcaaagaaagagagatgttctattctatctcaaggcggcaatagaatcatagatgctagagtccagaagaaggccaaagacttgaaattttcagttgagaatgagcaatccaaggtgatgctcgccaaatgtctgatgaattgctcttgctctgatgttgagcccgatgaagttgttagctgctgaggacatgatcggtaccacctatattgacaaccctgatcagtccaaggtcacatatcaagtgtttgacaatcggccttgacgtcaatggtggcactgactaagttgtcactttcttcaccacaaacaatagagacgcatcattagcaatgagttattgatagttaagattgtaacaatggaccgaacatgcccaacgaagaaatgccggcgggaaggaatccataatgacaaactttattgtcgatgatgggattagttaatgaaaaagatgatctcaactatcgccaattcctcagtccgttcttctttgggccaaaagaatactcaaatcttttttttagataaaggattatcaaatccagcctctacacctttgtggggtgtacatagccaaatattcgaacacgagtacataagtggggtttggatggggctaaaaagttttagcgcccctatcacatcggatgtttggacactaattagaagtattaaacgtagactaatgacaaaacccattccatatccctagactaattcgcgagacgaatctattgaacctaattaatccatgattagcctatgtgatgctgtagtaaacatgtgctaattatggattaactaggcttaaaaatttgtctcacagattagctctcatttatgcaactagttttgtaagtagtctatgtttaatactctaaattagtgcccaaacattcgatgtgatagggactaaagtttagtccctagatccaaacaccccctaagactctccataaaaaaaggtacaaactacagcaactaacctctcccattacatgagagatgatagcacaaaggttttaagaacaacaaaagaagaaaaagaccaggcttccaattttgttccaaggttccagccatacacggagaagaactccaacacacgcttctctagcagtttgcaatagctcttaattgtttcttcaccgactcccttaagaagcaaagaccaagtccttgcccaatgcgttcccatgaaaatgaccagcaagaaagatgtaagactggagccattaaagaccacattgttcctatataaccaaattgcccaaagaaatgcagctatgcctacaaacaatattctcttgagcctaggttcaacacaattccaattcctaaacatttgagacatgctacacagttgcctaatcccaaaagaatactcaaatcttatgtagcctgatttccttttttgagaacttgtagcctgatttttgacgattctctcattcaaccctacttcactcgtgtagtcgtgtccttagatgagccgaattcgctgatgtgaaagaggtgggttgagttcatgcatgcaccgaattcattggagagaagtagcagtatgccgaattctctaataggttgaattatttgatggaaaattactgggacaaattcagtgataggctgaaaccatcaatgagaagtgtgtggactgtattcattccctatttatgtgcactttaggtctctcaatttgtcgtcgagtttgaaatccatctctaaaccacaataaactctaaaaaccagtgcaaataaggtcctagtttgaatggtggtttcactgagatggcgcgcctacgtggtacttaaagtaaaaaaaaaccatgggaccatgggacccatatgtcagtgattgtccagttattagaataaagaaagttgtagtgggacccacgttgcacgcgcctccttcaacaccccaccggtgagcccaataaattggagatcggcagtgactcctccgccgcgacctcgtccacgatttctgctatagtctgcatcgcgccacagccctgcagcaccccagctccacacacggacgtcctccggctctagccattctggccgcccgctgacgccgactcgctctccaaggtggtgttaagcggagcacggtgtcgacgttctggacacgctcatcggtgctatacatcgagcacgatggtcagcaggtcacccgtggaggcctagtcgagcaccgctgtgatgcagtgctccaggccacggcacgtcttggacatattttactttcatttatacttcaagaaaggctggatatgactggttggaaaaacacattgaacaactcaactagtacagtgaacaacacataaagggcaattaggttaaaggggtctgaacaccaagatatgcttgaattaagacaaggtaaactattacaattaaatttaaagtgggaaaatgaaaatttaatatttttctttcatgtttggttttatattaaacaataaatagaaatcacaatcttattttataaaaagagagaaaataaaaggttggccaatgcagattaatgagtctgttggcaacttttttgacaagtcgacaagcacgatcgcaacacctacacgccttgcggtgatatggagtcgccaaccacctcgatctagccaaatggccaaattaagatgggttttgcaaaaaaaaaagctgaaccggctagcggagccgatttagagatcaaaatcagcctctaggccgatttaaatcgatacgaggataactacccgtctcgtgggcaaaacggaaggttttcaagacaaacctacaaagaggtgtcgcactctcgcagcggcggcggacagtttacggcgcaaaccgacaaagatggactaaactagggtaaaatagaaaacatagtaaaagaacgattcaagtagattgtattcgggggttttacaatgaaccggccttgtcccttatataggggttggtcttgccctctacaagccctcctccacgtccaactcgggatatatagaaaccaatggaaacacgaaacatgccttctcgagcaacgaaacccgagacccgacgaaaacagagtcggactcggaccctgacggtctgaccgcccacatacctgcggtcagaccagccctactagccggtcagaccgcccacatacctgcggtctgaccggccctagtgaaggaaacccggcactttctaaactttgccaatttttccctatttcgtccataggtgccaaatttgggtgtaaacacatgcccccctgcttttttggtgaacatacgtgaacctaaaagcatagaacatgttatctcagggcgataatccaattaccggccataggacttcctaagcatcttgccaaatgctcgggaagtatttcttcaagtatttcccattaattgctttctgaaaacaccgtcttgaagtgttttcatctccttcaaagtattcaaacgcttgtcaatgacgtcttcaagattgcttcctatcaagatcttgtaatcttcaaccgacaagtcatcttgcttgaaataccgaaaagagccaagatttacctcaactggcaaaacagcaatttcaacaatgttttattactcgactcggcttatccattagcctgagcgtcgtaaagagaagaacacaacaacttaatatcataagattcggcaaaacctctcatttccttggacataaagaagcccctttaacgtttaaggataccgaatctatgaacaatatgcttcaaaataaagtcaattacctccgtacaagtaatattctcgagcggcacggcttcggcccacttggtgaagtagtccattgcaactagcacgaaccaatgcccttttgatgacgaagaataaatttgaccaataaaatccaaagcccaacctcggaacggccatggtttgatgataggattcaatatagcgacatgcgccaaatgaacattgccaatccgttgacaagcttcactccctttataacatttgaaacaatcatcaattattttcggccaatgaaaccccactctcttaagcaaccaatttatcttacgggccgattgatgaattccacgaatcccctcatgtactactctcctagcaactttagattgatcattatctaagtaatactccatctatttttcggcgatataatatttgagcgcatgccgccgaatcttccgatcaaccttaagtgtaggatctttcaaatatctaatcaaaggaattctccaagctatttctaactcatgggcacaaatgtccgaataattaattcggccttttaatcaattgtaacgtgccccccagcctcctgtctgggatcggtcagaccggccacgcaatgccggtcagaccaccctgtctgtccggtcagaccggccatgcagagctggtcagaccgccggtcatcaccggtcagaccggccgtgcaatgccggtcagaccgcccctggtctgtgatttggccaatttcatccaaagacttaaaaatcaagcaccggcttttctagtaaaaaatactcctttcttcatattataaccagatgcttggtgtatcaaactattggacgaaaatccctcctctctagacatatgaaaaaattataacatccaactaacatgtctagatgaatactaattcaaatggcttttaaaacaataatcatcatggcatcaaaacacttagccaattgaagtatgatcaataatgaatcaccaaagtcatatgtgtcacatgcatagattccaataaactacaaatataagtaatcgacttgagcatgtatgtaaaatattaacaatgccaatgtttctaaagaaaacaactctagaatatattatcacattgactattgacattagccgaattactaataagcaaaactttcatggtgcaataattataaaatctatatcttatatggtgatccataaaaacacatacaatttggctttaaataaatatcaaagactcatgagccaaatcatacttcaaacacattatatgccaatctaccaattccactacttagaactggcatttgcaagatgtatgtataatattaattcgataagcaaaaacacacatgtactagatagtaagcaatgttctaacatggcataggcatataacggtaaacacaataaactcataccttgccttagcatccaacaaacggtggctcaaagatgtgatgttgtatccatcgccgtccgtctctcttgatttcttcataagcatattgatgtcttgccccccaagcaaaatcagttttcttgattgcacgatttcgaaggcaagatgaataccgtactaacttccatagcatcatgtggaggagacttatctctaatgaccgatgattcttctctcatcaaattggatttatcacttttatgggaaatcaccggtctctcaacttttacctctttggatctccacacttgcttaggtgtcatttgaggatctaaattgttacatgttttgttctccacatcttcggcctccttttctttttgacctatggctcgaagacgctgtagcctcttcttttgagagcgagataagccagaaggtatccacttcggctgtggttgttttccaggagctaagcaatgattcttcatatttttgatcgaagtggaagctcatgtgttgctctcaattttctcactcttctccaatgcccctcggtcaaaccggcctctgggcccggtcagaccggccacaagccgtcggtcagaccggctaggatggtcggttagaccggccgttgtctggcgttttgaccagccagctgttttggtcaggccgccgatgttgacaataacggcgtcggcttcagttttctccgcttgtatagttttcgccgcatctccagtaggtacatgaacatcttgagattcttcattgatagcaacgacctttagagctttggcttctttcctcacccacaccttcttcacttttttcacctttgatccaccggaccgattctttcatgggaaacggtcttgtcttgagttagaatgacttggtactgtcctaggtgattgcttccattcttgatgacacggcataggtgattgaggcatccatcgcatataatacataaaaggataaccatatagtgacattggatatggataccatggcatcacaaccggaggtttgtatggagttggtatggttgatggctccgattgctttgatgtttgaccaaatctcttcctacgagatgatcttggtcttttcgaatcactagtttggttatcaaatcgttgaccagctaatcctttcttgtatttagccataagcatctcaaaagtgagcctcggctttttggtcttttgggaattagatgacccatcctttacaactttatgatctttggccttcgtattttttatcctattcttgggccgagcatccccaataataacacgtttccctttctttttgtcaacatcaatagtactaacagggagaggatcactaacaatttcggtcttaggcatagatgtaaccgaaatagtttcacaagtgaccgatgaagtatcaatcggtctttgctccattaagctcgcatctttaaaataatcatgaaactcatgctccatttgtgaccatgtagaaattgaactaggagcaaacaaactataccatgtagatgcaaagtttgacaaagaaaagggaaacaacttcaacttaagcaaatcatcgctaccggccttaccacattgatcaataaagcggccgatatgctccattgtagtcatagcattctcacctgtgaatttcgtgaagttgagcacctcaaatccttgcgggtatgtgaccaaatctatatgttcaggatacggtctttgatatgtatgtatagctactttggattctatctcaccactatcccgcaagacattgtcatcatcttttccaatatccacatgaccaatttttgattcggtcttaggtgacaatgctatttcattttcgcttgtaatacaatccgaaccgtcatttagttcagctatactctcaatggtgtcattgtctaaactagcaacacaatccgaatcatcacttggttcggctattccatcattgtctaaactaataacacaatccgaaccgtcgcttggttcggccgtaatggttattgcatcattatccaagctagcaagacaatccgaaccaatttttggttcggctatacttattatggcatcactgcacaaattattagcacaatccgaaccatcgcttggttcggctatacatgatattgcactttcatctaaactagcatttaagctattgtcatccactcggctttcctgagccagagcttcatgcaacacatgatcaatatcaagaaatatctggccattcaatttttctttaatagaatcaagcaatccatcatatgcaatgtcggccaaatctttgtcagttattttcaaattgaaacatcagtttttaacatctctaaacctttcaatataatcagcaacagattcattgtatttgtgcctaaccaatgttaaatcagacaacctaagctcagttttaccagtgcaaaaatgatcatgaaatttttgttctaattgagcccaagtataaatagaatttgccggtaaagaagtaaaccatgtaaaagcagtaccggacaaagataaagaaaacaagcgcaatttaaaagtatcactattagcctcaccacattgcgctaaaaattgacctatatgctcccatgtggtcctactatcctcagcactaaatttggtaaattcgggaactctataattacgaggaaacggcacattatcataatagtcaggatacgacttttggtaaaccttagcacgattcctagtttcaataccgaatttatccctaataatcccactaattatttcctccatattatcaggcctatgttgatttggtggtggatttggtgtcctaataggttgtgtttgcggcgcaatatggttatattggccttgtctagtatcgggaggataccccctagcaacatcattataagcattaggaacatgtggggaacttggggactatttacagcagtagatacaggaggatcaaatgttctaagatgatacaaacaacaagcattagtcattggatctatcccctgtatcggaataagtgcaccggtctgaccggcccagggcctggtttgaccgacatccagaggcgcggtcagaccggcctgagtctcggtctgaccgccggggtaatacccggtcggaccggctagatgcgccgctccatcggttccactatttgtttgatctataggaggtttgttagcagtgatagaggctttatcctttaacgtgtaatcgtccataagagagccgaatttaatccttaaaaacccatcaaatttatccttaaacattacatctaacttatttttaaaagcaatcatagataaatctattgtagatgctacctattgttggatagattgtattacctcgtcattgcttaccaaattgggagcgagcttaggaagtggcccgggcttgatgatcacgccttgacgagtcctagtgcacgccctcatcaacgcctcctgtgtgatctccttgatgtactcctccatggacttgcggtcttctccttcgaaatcatccaatgtgaccggcatgatctcgttcccgctcatcatggttgatgaagaaattccttgattaatttcggccatatagctcatagctgaaattgctgaccgaatagattaacatacggtcttgatttttcttcttatgttactgtatgctactgcttagccaattttgtcaaaactagctttattgattttctgaacgtaacagtgaatttggtactgtagcaaaatataccaaagaatcaaagatcaaccgatcttagattagatcggctgctatgttttttttttcagtacgtgagcagtagtagatcggctgtgatagcctgatctttttctgtttttaggaatttgtatacagcaaaccgaataggattgagattcaaaattccaattttcagcccgtgtacagcaagatgctgccggctgcttgttgctgtctccacgcgcgagtatggatcgatttcggctgtatagccgaaacactcgatgaaacaacagcagcacgatagatagattgattcttggttgattgtacaggttgatttcggctgtttagcccaaactctcaatttgacgaaaactactagattaaacgaaattcggccgtgatatggccgattagatcgttccccagcggagtcgccaaaaatcgtgttggcaacttttttgacaagtcgacaagtacgatcgcaacacctaaacgccctgcggtgatatggagtcgccaaccagctcgatctagccaaagggccaaatcaagattggttttgcaaaaagaaaagctaaaccggctagcggagccgatttagagatcaaaatcagcctctaggccgatttagatcgatatgaggataactacccgtctcatgggcaaaacggaaggttttcaggacaattctacaaagaagtgtcgcactctcgcagcggcggcagacggtttacggcgcaaaccgacaaagatggactaaactagggtaaaatagaaaacatagttaaagaatgattcaagtagattgtattcgggggttttacaatgaaccggccttgtcccttatataggggttggtcttgccctctacaggccctcctccacgttcaactcgggatatatagaaaccaatggaaacacgaaacatgccttctcgagcaacgaaacccgagacccgacgaaaacagagtaggactcggaccctgacggtctgaccgcccacatacctgtggtcagacaggccctactagccggtcagaccgcccacatacctgcggtctaaccggccctagtgaaggaaacccggcactttctaaactttggcaatttttccctatttcgtccataggtacggtgagatggagtcgccaaccacctcgatctagccaaaggaccaaatcaagatggattttgcaaaaaagaaaagctaaaccggctagcggagccaatttagagatcaaaatcagcctctaggccgatttaaattgatacgaggataactacccgtctcgtgggcaaaacggaaggttttcaggacaaacctacaaagaggtgtcgcactctcgcagaggcggcggacggtttacggcgcaaaccgacaaagatggactaaactaggataaaatagaaaacatagtaaaagaacgattcaagtaaattgtattcgggggttttacaatgaaccggccttgtcccttatataggggttggtcttgccctctacaggccctcctccacgtccaattcgggatagaaaccaatggaaacacgaaacatgccttcccgagcaaggaaacccgagacccgacgaaaacagagtcggactcggaccctgactgtctgaccgcccacatacctacggtcagaccgaccctactagccggtcagactgcccatatacctgcggtctgaccggccctgtgaaggaaacccggcactttctaaactttggcaattttttcctattttgtccataggtgtcaaatttaggtgtaaacagagtcttcatatctgatagcactaacgagcaccaccgagcatactaccgtgttagaaacttcattggccgcacacgtgcttgggattgtcatgtttctaaacaatcctgagcaagcacaaggagcggcaatacatctatatatttgtagcagcagcaacaactttaggaggcaagagaataggcaacaacagcttggtcaagtaacttaattagcaaactatagtggcatgctggtcctagctaggaacatttgctatctcctttcctacctctcttcccgcctccaatccatttcttagtttctagaaccttttagagttgtatctcctttcttcttattgttcttcaatttcacctcaaccatttgattgtgtctgtgatttgtattaaaaaaatgttactagcagtagaatcgtagatgcttggagtccagcggaagatcgaagacttcaagtattcggttgagaacgagcaatccaaagtgatgcccaccaagtattcgacaaattgctcttatcttgatgtcaaacccgatgaagttgttagctgttgaggacatgatcggtgccaccagtatcaacaattctaatcagtccaagggtcatgtaccaagtgttagaagatcggcctcaacgttaatggtggcacttccagtaaaaagaaaaagttaatggtggcaccgactaagttgtcttcacattcttgaccacaactgggatgcgtcattagcaatgagatatcgataggttaagattataacaatggctaagataatcatttgccatgtctagttcagtcaaagacaacataagaaagaaaagtgataagggccacatgaatgcttcaaaaaggagaatatttcaatactttaaagtgaacaatgaattttgagtgctacaaatctaaaatggaataattcgatactactgaaacaaatttgctctttggtaagatccaaatgacgtgtcataaaaccagcaaacaagtttatcttacttgccactaattaatccaccgtgttgtttttcaaaataatatggacatgttcgatagacgaacactgcagctacgtgcgtgtgatattattggtgtcggttgtggcatagctacagaccaacagccaaacaggcccaacgaagaaatgccgtcatgaaggaatccataagcagttaagcacaaactttattgtcgatgaggggattagttaatgaaaaagatgatctcaacgattgccaattcctgagtctgatcttcttgtgggccaaaagaatacacaaatcttatgtagtctgatttctgacaattctcattcaaccctacttcactcgtgtagtcgtgtttttagatgggccgaattcgttgacgagaaagaggtgggttgatttcatgcatggatcgaattcgttggaggagagaggtagcaggtaggccgaattcactaataggctgaattagttgatggaaatcactgggccaaattcagtgatgggctgaaaccatcaacgagaagtatgtgggctgaattcgttcgtaggcctagttagtcaaggaggagaattaagtggtggtcaaattcagtagcgggctgaattcctcgatgggaaagcggtggctgaattcagccatgggccgtaggtcgtctgaatttgttcgtaggctaaattcgtcgatagaagttaagtggttgaattcggcactcctgatttttttaaaaaaataatagcacaaatgcatacgcttataatgtacgtaccctctatgaatacacacactctatccctgtcagcacctccagaaggccggaccagtatactttgagattgataagctcactacaggtgcctctctatcgacatgtatatcatctatcactaagaaaaaaattaactataaatatgacatttttttcaaatctaaaatttaaatttacataaatagattacatcacaagaaacgtaatcgttgttagagtgtcatcatgtattattcgttcgataggaattaactaaccaaggcagtagcactgtagcagtgttgaatttgtggtaattaaggcagcgctcgtggcaaggaagcatgataataattgttatcgcaaaaagacgcagcttgaaaattccatgtaaaggtatcgttcagcaatgtgcaaataccaataaaaattatttattaaggcgttttcattttttctataagcattggatttatcacccaaagctaaccaatttgtccactggttgataaagttacaaatcagtcacttagagcaggattaatagatcctagtcagccggcgctagcatgttacccgtcagcgaaatccgtagtggaggattgagaagggaagaaatagaatggagccggcgttccatctatcacccggctgaagcgcaacacatgaagaaaaaaaatgatttcttccaatcagatgcgaggagatcaggtgcacatgtgaatattaaatatctaaatcttcgatagagataaacaaacagccaacctaacagccagtctattatattagtgatggctataggtgacatggtattagtatagagccggcagcaggctatgttattaacattgctcttatataaacggtgatgacttcaacgccaatagtatcgaggacctttatgtaataaaatttttacaaagttctcgacacatatgacactaatgttgaagacctatttgaagatatattttattacaataagtcttattttttttaaaaaatacaaataaatcttcagcatcaatatcattggtgtcatccttctccatgtaagtaacttagtttctttgagaatattagggggacggcgccaatatgacgccattctgttggaccgcgatatcaatgagtttggcgtcgtgaaaaatattcatatccaaaataagtttaaggagtttgattgtaaaataagttttcaaatgaaaaaataaaatgaaaaatccaatgataccgtgcatgcatatcttggtttgtcctcagagaatcccatgggatccccgatcttatccacagcatggttgccacgtcactgccactccctttgccgatagattccgtcagtactcgacatgcccattccgctgatctaggtaacctacacgtgccttcacccaggaaacgtccacaacacaaaacttacccatggccatggatggatcacgttttcccggagaccaccgtacttaattagtaacttaattaactactaatacggtgcgtcaaccaagctgtcattgccagcacgatcggagatttccatttcagagcgcaaccattggacgaaaaggaacgactaccttctctacttttatttgcaaccattggagtatgatttattataagatcatttcttctttatatgctgcgtatcatacgccaatgatcgtatcagagggaagttaccgttggtgatttttctaaaaacatactcccttcatctaccttttgatagttatatttcatcttgacacatagaccaaggataagtaatttcacttatcatctatttaaacatgctactagtcattcctcgtaaccaaacgattcattaatatttacatttctcgatacccgtgcaatcaatcttgtgtggaagaatgaagagtcatgtattaaatccgagaaagacattaagatgataggtggttggattaaaatatgcctatcaaaaatagatttttcagatttagaaatatgacaatcaaaagtagatggagggagtcctacaacactgatatttataactcctatacgtttgtccctataaacaagatacatacaatctacccctgtactcagtatcttttaaagacagacctacaatattttaagatttacgatttacaaagtcatcacatatattctcacgataaacagtatgttgcctatcaatcaaataataattagctgtaaatacgagcactcatgttaagttaaaaaattaaaacaagataaatcggtctcaccataaaaagaaaatcttttagctatgctaattaccatgggtaatttggttacggtaatgatcaccggtgctatagccgtcgaaagtggcggatcagaatgaaatagcagtgggctctgagcaaactggatagagttacagtcccccatctatatatggtaaaaaattttagtagggtctttatggggtgtctcgtagtcttcacgccagtaatggctcgagaacctgccgcctccatgctggatccgcccgtcgaatcgattcatccatcaccaaggaggcgaagcacgcacgctagctcgcatgttgatgttgcgctggagggtggagcggaagtcggaggaccggcttctccaagataaggtttgcaaaggacacgttcttgcgtcctaataaaaggacaccatcttttcctcctccactcttctccttgattcccttctctcttctctctctcctccatttattctggctcattagctgcagccgtgcaagcgagcatcgtcctgttcctcgcgtcgggggaatcaagaatcggtaggaatcgatcgaggggttgagtggtaggtgctcctaggaggcggcaataatgctggaggggaaggcgcgggtggaggacacggacatgccggcgcggatgcaggcggcggccacgtccgcggcgtcgcgggcgctcgacctcttcgacgtcgccgactgccgcgccatcgccggacacatcaaggcggcaagttgctcccaagaaacccccatggatttggttgaatcgaccatgcatcaatcgattcgattgtgcaggatggatcagaggagatgattttgggttcgatttgttgtttgtttgttgatgttgcaggagttcgacaagaggtacggggtggggtggcaatgcgtggtgggcgcaaacttcggctgcttcttcacccacaccagcggcaccttcatctacttctccctcgagcgcctctccttcctcctcttcaaggccgccgccgccgccgccatcgccgcctcctaatccttccatgcccggagatccattcgccggcgaactacggcgtcgagcgatagcaagagaagagaccaacttatgtacgtacgtaagaatgtaatgtaagctagctcagatgcgccccatttgtacatacaccatgcttgtgcaatctttgccttctccttcttgatgctgctcatgttcttggtcaccgtggacgcctacgccacagccttgtatcaagcttccattttcagttttacagcgtttcatccccacttccgagttcagcacattcagcttgaaatcaagagaaaaatccttggctggatgtgcaagatcttttcttgcagtgcattcagtactgacgttttggatggatgtgacatgtgaattgcgatcgagatgaacttttccatgtaccttttctccaattaaagtggctaaatggatccaataatggggttgctttctctttcgcttgcttggatggttgaggggttctattaaatctcgcgaaaacgaaagcagaacgccctgccccatgattgcgaatgatatgaccacgcgtgtgatggaaagcgacttgcttaatactagtagcatatttttttctgaatgttcagaacttcagatgatcaaaacctgaaactggagttcagagttgggcgtgtactcgtatgactagccaacaaccaccctctaatgtgatggactgattgatggtcgattctatgagcccactgcagcatcttgcagatatttcgcaaatacatcattcattaaagagtagctgaattacatcattcatgtttggcaactatcgtgaaagagtagcaacggtggtttctaagcatttcgctccattaaaggctgtgttcttatctctcctttcccaacttctacaccttgttttccacttgaaacggtgtgtttttttttttaaaaaaagtttgtgtatgaaagttactttaaaaagatatattaatccatctttttagtttgttttatctaatacttaatcaatcatacattgataagctatctcgttagccgtgctgagggaaagagtttcgagacttgaggttcaaactcaatataattaccccaattaaatggacgtgttggagtttaatccaattaattaatttgagtcttagcccaaacacgatcacctctgcttaatgcgaaaattgagttgatccactgacatgagaataaagccattgaagcaaatgtttagtttttgcttttgttcatttggttttctccttcggttctccttctttgttctgatttcctattgatgaaaagatttctacaaggattagggttgttgctaccgttgaggattgcttgtggatttggaagacgctacgatttatcgagaataacttaatttagatgttttgtttatttattttccgctgcatttgtaagacttatttatattatttgtaagacgtggatctgtgtatcaatttgtcatttgtatagtctggctagtcctagacagtgatttgaatatacattttgcttgaaattcgggttcgcgaatttctgggcgtgacaagcggttaacactgcatgttatgtttcgaattgtgttttcttgagatgtaaactgggaaagacttcttatgagcttcgatttggacatcaacccaaactttcacatttgcgtgtttttggctgcaagtgctttgtcttgaaatctagaaatttggataagtttgaggtatgttctaccgatataatgtttctttggttagcccgcacattctcattgctatcgtgtacttgttttggagattaacaaaacacttgagacttgcaaagtttcttttgatgaggctagtccaggtattaaaccagaaattactggtacattatcacatgttcaggaggaggatggtcgtattaagacaagagtgacgatgacgacgacgaagtcgacgcggctagtcagatcaccaggacatcgccggtcagaccagctcatgaggtgcggtcagaccggccagggacgtcggcgtcaggttctgttaatactgatcgtaatggacttctagaggctacaacttcgaccagtgagggtacagaacgtgaaacaacttcagaagttgctgcttctttgcatattcaacgatgacatctaccggaacaaattatcggtaatataggtaagcggactacaaggtctaaggtaacaactcatgatgtttgtgcaaattctgcattttttgcttcttttgaacccaaagatgttactcatgccttaactgatgaatcgtggattaatgccatgcatgaagaacttgaaaattttgagagaaacaaagtttggacaatagttgaaccaccttttggacacaatattattggaacttaatgggttttggaaatcctgattttcccaaccatgtttttaaattgtctaaagctttgtatggtttgaaacaagcacctagagcatggtatgataggcttaagaactttttgcttgcaaaaggttttcaaatggaaaagatggacaaaacgtcttttgtactttatcatggtgataatcaacttttcattgagatttatgtggatgataatatatttggttgttcgacttactctttggttgtggagtttgctgagactatatgtagggaatttgagatgagcatgatgggtgagttatcgtactttttaggattgcaaattaagcaaacacctcaagatacatttgcgcatcaaacaaagtacaccaagaatattttgagacggttcaagatggagaattgcaagccaatttcaacatcaattggttcaacagctatgttggatcccgatgaagatggtgaaactgttgatcaaaaggagtatagaagtatgactggatctttgttgtatctaactacttgtaggccagacatacaatttgctatgtgtttgtgtgtacgctttcaagcttctcctcgtgcttcacatcgtcaagggtcaagcgaattatgaagtatttgaatcatacacttgagtttggaatttggtattctacttcatctcctatatgcttaagtggatattccgatgctgattttgctggttgtagaattgatagaaaaagtactggtgaaacatgtcattttctaggaaaaaatctagtgtagctcaatcaactactgaatcagaatatgttgctgctgctagttgttgttctcagattctttagctaatattaactttgaaagattatggtcttgctcttgagaaagtttctcttttttgcgacatacaagtgctattaacattgctaagaatcctgtacaacgctcacgcacaaagtacattgataatcgatttcactttttgagggatcatgtcgagaagggagatgttgaattgacatttttggacaaaaagttgcaacttgctaatattttcactaaactgttggcttcttcttgctttgcgtttcttcgaggagagttaggagttattcatccttttggcatgatttgaaggggagtttgtgatcttggttttatcaaacaaaatctgaaaataaaagaaacattgagaaaatagagctttgtcttattcatatggtatattcttgtgaatgctagcaatactatgaagatttatttgtctctagcataggttgtgtgtattctagttttttttatgaggcttagatattgcttttaagggagatgatgcatgacacttaaattctacacctgaattaagcaaatatgcaatgttgatgctagtgcatggattggatgataaatgcttatgtatatgctttattcgattgttattcctcaaatagctttttaattgctcattgtgcaaaagaatacaaatatatatgagagaaaaaaatgaataccgaatccttggaaactgtcttgacgacaaggatgtattcgatatgagcaaagataatggatgccgaatccttggaaacagtctttacgacaaggatgtacctagaattactgagagaaaaatatgagcatcccatacgcacataatatctattataggccgatatgttattttaacgattaaaacttatgattactctatttagcagatgaaccaaagttaaccattagaaagatcactaatcacaatcttagtatataggacttaaccaagacaatgtaagattgaaattagtgaaagcaacaactagccgatcatatcaaattttattaataaactgattcagtaaagttaaaatacaataagtggataactcatcagctaatactccgatgaaacgataactaatatcatctaacttagataaacttacctaaccaattataacctagaagattgaacttaaccaagacagttcaatattattaatgggctagataggtttagacaagccgatacatgttatttatcatggctgatatagaaaccctaattgagaaagcaacaacaatctaagcaagagccgatatatctgataagcaacactagcacaagaagaactagtatatgggacctaaccgaggaagtactaattccgtcgataccagcaaagatttgatgggatttacatcttgccagagatcgaactcaacagatacagcccatctcgaaaaataataactcactgagaataaaaagggtggtaatgtgccgaaagttgtatattgaactgttgttaaattggaaagaccctgggtgtacatatctatacccataagcaatactatgtccgactctattacaattggattgattaagaactctatctttaacttgtcgatgttttaggtcacgactacggtattaggatggtatgaagatcgtcggtaccagtgtatatgcgagattgaggtaaaatagatggagataaggatttttatacaggttcgagccccttccctactcttttagccgaagccggtgttgctctttattcgtctgaatcacacaagtacaataattgggataacctatctagctgtcatcggcttggcgacagggatcaccaacatgtaatcgacgacaggatagtcttcctcctcgaatatgaactcatcgagatcaaagatgatgctagatcccttttgttggcctccgcaggcaccatattgggtctgtctaggcttatctctgatgtcgatgtgttggcggcgtgtgttgatgtctattctgatttgtgtgtcttgtctgttgtcctccctccccctaaggggtcctgtatttatacccatagatgtccccatgtccaagtagaactagggagaccaatatggatacaatcctagtagtccttgtcgtttccatgtagaattcttcttgtccttccttatccggaactccttctatatatgaggtatgatccatataagacttggtatatagtgggtcccgccgagcttagtcgattactattgggtatgtagtatccataaccatgacagtagcccccgatttcaactcaaatgaattcacgttgtcatccgcgttttctctgtcaacgttgtcatgctcacttggtcattctcgacaataatcgagaagacatggagtactcaacatcattgaaagaatatcaacggtctacaagtgaatttgaattgaagtctaaacagttgccataaacgagcgtgagaaaatttcggcggcaacgcaaaagaacgagttgatgttctcgaccgaagaccttggaacaacagttgtcatgctcgcttaaccgttctcggaccgagaaggtacggagtatatgactaagtttcctgtcctgccataatcgagaatttgggttgaagttaagaattttcatctcggcgggtacaccatcgcttcattctgtaatctttatcaaactccaccaaccgttctcgagtaatcgagtagttgtccaaccgttctcgagtaatcaagtagttgtagaatcagcgacaaagccctaaaatatgactttcctgaaatcaatactcagaatagattgttagatacaaatagcccccgagcgaacgctcaagggtaacacaatataatatgaatttgaaaattgaaaataaattgaatctgcacatgacaataaaagagtactctcgctaaagctgccctcagcaatcggagtttggtactcttcctagcccccagttgtatttatggaaaaatcgtttttttcacaaagacagcttaaatcttataacaaaccatgctgaagctgatgaaatcctagcccccagccgtgaagttgggaaaatcaattcctgattacatgacttagttaatacgcattcagaatagcgtaaaggaatgataggatcgacttcaagacagggagatataaaaaaagaggatcaacggacaaatattgcatatacaaacacttacagaggttgtcgaacaatccatctcttgaacccatctcgtcgaaaccttgtagcaccaaagtcccctacttggcgcaccactgtcgatggggatacccgtagaccggataaatagggtattggggtacattggtacaaggatctagactttacgacatcaagacaaacagagagacaaagattatactggtttaggcccctcgtgaggtaatagccctaatccagtttatatgagattgatatggaaaaccacagaatacatagagaacagatgaatccggtgttaccggcgagatccttgttgagatgattttttttgaaaaggaacacagcaggggaggcccccgctgttaataaactctattaaaataagagaaattacaaagaactaatccaataaaaaattacatccctatctctcacatgaattctaaacatcaaaaagaaggagatcaccctttaagagctgtctccaggaagacaaagaagggggtttatgttaaaaaatatagtcatttctttgcttccaaatatgccaagcaccctaaagaaacttatccataaaacaaggctcccgataagcagttctcgcttgtgtcaacatatcttccatactcaaagaggtattccaagagatacctagcagattccagcaactttgtgcaaaagggctctgaaagaacagatgcatcaaattctcaataggcgctgctgcacaaaggacgcaggtcagactacaatcagggggagcacagtgcttgtgatcaagcataaactttgtgttcaatctgttcattagcagcaaccacccgaaaactttcaccttcgagactgccttaatttgttgagatgattcgacgggatctcccagcgagaaggcttcttgtcctccttcttcgtaaactatggtgggtggcgctatgattcgatgatctgaacccctcagggggtgtgccttttataccgtgagttgccttagtctcccagtagaactcggagacaatgaaccctgcacgatatagaatagacccaatcctcctcgagtaggactctgttaatcactagcccgtgaggatattttccataatatcttatagatttccttatcacgtacggaagtaaattgtatgaacgatggtataccatactcgtatattccgtaagtcataggataggaggtatgccttatccgttaccatgacagtagcccctgacttcaacttaaatgaacccacgttgtcatccacaacttctctgtcaacgctgtcatgctctcttaatcgttctcgataagaaccaagaagacatggagtatttgataacatcaaaagaagttcaacggtcacatggagtattcgataacatcaaaagaagttcaacagtccacaagtgaatttaatttgaagtctaaacaactgctagcaacgagcctcggaaattttcggtagcaatctctctcctttcctcgaaatgcgaaccgtcaagcagtgcgcttatttaaggtgtttttggtatccatttcaagtctgttttaaggaaactattataaactccgactcctgtaccactcgtatcggcttaaccaaaacgtacctgagtccgattcttacacaacttcaccaactcaggtttccattattaaaatagaaagcaggatacactttccttatcctggaaacttaccaaaattttatcaaaattttcaactgaatcccctaagatcacggcgtgaaatccttctttgacccagccttgactaacagaaattgccaaattccaccgttaacaattacttcctccatttcacaatataagtcattctagcattttccacattcatattgatggtaatgaatttacataaatatatatgtctagatttattaatatcaatatgaatgtgggaaatgctagaatgacttacattgtgaaacagagggagtacaaaagtcatgtgggacatttcttatatgtggtaagatattaaatatttttcacctgacattgtattgcaggaatacacatgaatcagagtttattttagataacggtagcacgctatatccagcttctgtagtatgtacccaagggtgtacagggttgaattattacatagttatgcgagaatacgcttgatactaaaagaaagggcacattttatatgatataatggatattgctaagacttattagttttcctcttgaaattatgcggtatctgaaacaaagtcttggattatagtgcgtactgctaccggaatcctcaccgagtgtgtattatcgtctagccatgtcaagctcccaaatgtatatccaccttgtactctctgccttgctgtaaatgtgactttaaatgttgcactttgactaccacctttagcgaaagtgatcacctgaggctccacaacaacattcaccccagctggtgcttcaaccaccaccttgtaatttgcttctgaccctccaacgttggtgacagtgcgccagactataactgagtccttgaggtctggcacagcgatggatgggaggttgagttggtagagcttccccatgtaggacttgcagtcttcctgggggtcgagggagcagttaaagaactttgtatagtcttttgggtcgatgtcatacactaggccagggtcgattgccttgtttggctctatgtggccgccgccgaagtcgaaagggtcggccacttttcttgctgatccctcagcttgaattggcataccaaaacggtccgtcactgatgctgcaatcatcaggagtataatgagtcctaattaagttgaaagtcataaagttctcaaaacatttcgaggtagtatatatcttttattcgtacctgtagtgacaatggcagacttgatcatggcaggtgaccagtctgggtgaaccgacttgagcagtgccaccactgccgagacatgagggcatgccatggatgtcccggacatgaacttgtaagagtcgcccacagctgccagtatgctggccccgggtgcagctatgtcaggctataaaaaatatagagcactaaaactttttaggaagcagttccatcatatgtattaaaggtaagagggcgtgacaatctagcatttgatcaatgaatgtcaagaattgcaggtcaccttcagtatgccgggaaacttagtgcccggtcctcttgacgagaaccctgcgaccctcggcgatagcaccccattgccgaccacggtgacagccggagacaccttcacgacgggcatgctggaaagtgagaagaaatgtctaatagttaaaaaaaaaagaaaagttacatacatagttcaaccttgtttgggtcatcgtgtatgctattctagagatcataagaaattgaatttgtggctttctttttccaaattggagtttatatgagaaaatctcacataatgtgttattgtggcttgtcaactagttcgatcgatctctcaccttgtgctggtcgcataggaggcaattctatttgcaatctctttgtcaacaaccgcacagggcattatgccattgcaggcgtccagggtttcaagaagattgaaggtattgccctgcgcgaagatgatgcccttggcgccttccttggccaagaggtcaatggtgtccttattgtacggctccggccacagcacgacattgcctgctgtgacgttgatcgcgctgcagtaatccagtaacaattgaattaattaagactaaacaagtaactaggagtacttgggttgaaatgatcactggtttggttacctagatccattaacaactacaagcgtttgaaatttgatgctgctcactgttgcattgtagtaaagagattgtccctgcatgtacgatgtatattacgattagtaagtgtttttacaatattacgtagatcgttcattttttccaactcaatggttcataattattcgtacttttcccttagcaactggtagtaaaattaatgaacaaatgaatcaatgcttgagattagttcataaaaaggcaaaaactactactcctccgtcccaaaatataagcatttttagtatagtgataagtcaaatattttcaactttaactattaatagcaaaaaaaaaataaaaaagatcaatcatacaaaattgatgttactagatttattattaaacaaactatcataatatgtaactctttttattgaatacatcttacttttatagatattgttgctcaaagtagcatctcgaataccgtgtcagagtataaaaatacttatattttgagacggatagagtactagctagtagcccaccataaagatagtactctacgaatgaagaatccacatcgagctagcagtgtaactatttgtgtcaacagcaaatagagtaatcaacaattacttcctccatcctaaaatataagacacaaccacttttttacttgtctcataatataagtcatgtatgcatacatatattaactatcatatcttgattttttaaatttggtttattttaattccacgtactgccataagtctaccaatcacattgcttgcatgtatggatatgattccatcgaggagtcgattaattaaattctttttttatctttgtgttagaagtggttaagacttatactttgggattgaaggagtaataaaatcatccaccatccatccctattatatggatgtaccagccaaagaaaaagaacaggagaaacgacctcacaaggtggtgagctagacgacttgggttcaaaacctcacccttctaagtatttgatattaggttcttccctaatattcacgttttaaagaaaaaagaacaaaaagaacaagataagaagtgaaaaataaaagttagagcaacaaaaaaaacatatcaagttatcatgactactccagttgtcaacccgtgcatttcatgatttgttattcatatttaaaatattaaaagagattttccatgaattaataattctaaaattcgtaattaataaatatcaagttatactcgatctggtgtattagctataacttttccattttttgataagtttgaaattaaaatttagaatcagtaaaaactaagttgtattcagttcggactctcaattccaacaacatgcagaataacggggtttttaatgtggcccattatgtaaaattcatatcaacggtcatgataatacacccataaaataaaatagattttctagttaggctgtgtttagttcagcgtaaagtttggattttggttgaaatgggagatgatgtgactgaaaagttgtgtgtgtatgacaggttgatgtgatggaaaaggactgaaatttggatccaaactttacatctaaacacagccttagtgaggttaagatagatatagattatttaccagcaatttctcattgttcccgagcgatatggtggtaggaaaggtccgatcgatggtggcagcggccacggtgatgacccatggtacagtgttctgcaccgtctgtgatgtgggaccgtcgttcccgccggcgaataccacagtgatcccccgggccacagcatgcagagtcccgtggatctcgttaggccctcctaacgacagtgacaacacgtccacaccatcgtttatggcgtcgtcgacggccgcgaggaccgcagcatcaccgaaatttccgcccacaccccagcaaaccttgtatactgctacacgtgcgcgaggcgctccgccacgcgccacgccggcgccaaggccaccttggtggtggctcacgttccacacccggccaccggcgatcgtcgaggcagtatgcgtgccatggccgtggaagtctctcggtgacatgtactcgcccttcagcatatcgtcggtagcaccggcagagtaccaccgtgcccctatgatctttcggttgcaattcgtggtgttgaatgcatcaccggtctggcagacacctttccaccgtgcaggcacagggccatacccatcgtcattgaagctaggtgattcaggccatatccctgtaacatagatatatcattgaaatattcgggcagccgaattatatattaagattgagaactagccagtatatgctggaatttttttttttaaaaaaatgtgttttaaattaattttgagctagattgtgagtcaatgcaatcacacctgtatcgacgacgccgatgataacatcttccccatacatagcatctttaagaacacccgatttttcataatagttgagaccaagaaagtcccagcttcgagtcgtgtgcgctttcccataagtgttaggtttcacattgataactccagggtattctgtatcggaaaactcatcagttaaatgatcacgcagctagctagtactataaagccatttccaaccaaatgactagtatgatgtccatagtattaaataagctgccacctaagataaaaaataatgtggcaagtgaataaataagaaaatagaagaaaaccatgtcttccatgagacatggtttctacacaacatataagacatcatatgagataagtagcattaaatttaagtatggaatagtggtgtttgcattggaagagtagtgtctagcactagtttcttgatgacgtggagtttacagaaactatatctagtgttttgggttgggaatggcctaagcatgttaactttttttttctacccttaagagcaagtttaatagtatagctaactagctccaattcatctatagccaatgtaatagacaattcatacaataactgcttactatactattaatacatggtcctacatgtcatacacacattatgtcttggagtccgtgctgcagctggctacatatctgtaacccgctgttcttctctctcttcctttatctctttaaaatatgtttatagctggcttatagtctgctattgtacctgctctaaggtttaactgagtgttatagccttttcttatcatattttttaatcagtttattgccgttttttcttatctgttagcttatgcctgcaattatagcatggacatgcatataatatataaaactactaactacaactttagtataaatgaatggcagagtattctttaaagtgtaggttagactaatctttcttttcacaacagcgtacaagacaaaaacatatgaatcatgagtattgttctagtgtgtaaaaaagtgctgctagagtgtaggtaagaaactttcagccaattgacaaatagattacgtccttttttttatatgtaaactttaattagtatttgaccatttctccaaactactaagagcacccgcaatggtaaagtaaggtgctctctataaaacatctacatctcagcaatagactagattaatagtaaaccacctcaatagtatgtctacatgggtatctatagctctctaatgcattgtctcgtttttctctatagactatctccaggttagtagatagctttgctctctctcttcatttaatctctttcaagtaggaaaatatgctgacttggatctcttgtagagagcctatagattatcattgcgggtgccctaagtactaacgtgccaatgccattacgggtgtgatgcttacttgcaagttcctcggcttgggattcggtgagcatcgcggcgaatccagaaaaaccatgcttgtaactgtacacaatagacttcatggctccatccttactgtttcattgagggaaaaccagaaaccctgagctaccattttttttctctagccaataatggtgttccattttgaatcattaacaatcacatacctcccaataacaaaagtaagggcatcatggtgcgatgcggtaaccatggatggatcgtcgtgtttcttctcccccatgtacacgatgtagagctgaaatttcgacagcaatgattccaatatgataataatagcataattatatttcacaaacataaagcaaatttacgactcgagagaggaaactaagagcaatactatgggcgtctaaacataaatccaagataccacataatactaaatagtgatgtgagagaagagagaagagagaaatagacaccactgcaacggacaacctctatacaaactccaaacaaaatgtgacagtgtattatacatctattatgcatgttagtatctcttaatttgttggtatatatatgacatgcataagaaattagaggtagtagccagcactactataaaattgccccaagcatgcatcttactttggttgatgcgctagctgaaagggggagcaaaaccaagaggacaagtagcagcgcagaacgacagaaagctgatctaaactccatgttcgatatcgaggagttgctaatgtacgttaagcttgctgtgcattggtggccttgggttctcgcagctgtgccaatttatagcagcctagctgttgagaaacaaccgcgtgaggacgtgcaagaaacagtcaaaagatcgaacatcggtccgtagcttctgcttacatgcaggtttgtttctccttttatctaattctcctttcatcctttgacgtttcattcatgaattatcatctggtggtaatcttcttaatttattcttcatttccctcctgttcctcatttctttacgccacatggattgttggtaaaaatctctttctgactagtaaattcacggaatattttacgtgtttgaaaagaaaacgcgcaaagactagccaatcaatagctaagatgaacattagttggggttttgtttcttcggcatgctttcatatataatgacaaaatgtagtcaccagctcatgcattgcacagttgtttttaattatcgatataaatattagaatttcaatcttatgaatatgttcaatattttaattttgtactagcttagactaaaagaacaatccacgttacttttgaatttcggattaaattaataaaatactaataattccgttcaggaaaaactttatattatatttatcgattgttttcttgataaaatctacgctggtggtaatattaaaattttattaatatctaaaatttaagcaaatgcaagctttttaatttcggcactctatgccttcgcacgtgttatttttattaatacttatataatttgccatgcatgttttatgtaccataaattttaaatatttatggccataatactatctacctaatcaaagttccgatatttttctaacatgggtgtgtacttgcacttagcatacttcattgttgttgatagtgtaaagatctacctgaacgttttcttttttaaaaaatatttttgaaaggatggtagcgctgatgccgatcagctataccaaaacccaacccagatgtaaagcaagatgtctatctacgatattactgaacctgaagaagaaaacatagctgcgctatcaggtactacgagccctctgccccacgcatctaaccagctcacgtggtttgccggttccaccgaatgtaaatataattatttaaatttaaaatttaaaatagtgatacttattattttgtaaacatcaaaagagcattactctatctaacgtcgtgatggcaaaagtaaactaattcaaaattgccatggcacgatatatatagttacatatttgcgtccgaacgatagcttggcctaatttaaagtggtttatcttattatattgaaaaaggctagcatgcatcgatttgttattattattaattttttaatagaaatgatttacatcttcggtctctgctgacatgcacacaaccaataaataagttttagggttgaaaaggaaaaaaaccaagtgatgggaactcccctgaaaagataatcagctgaattaaaagtaaagacaaattacatagattccagcaagtaatctgtaggctggcatacatcgtctcaaacaaattaagatcattggctacaaatttcaagaatatagcactcctgatagcatgaaggaccaagtgtggagggtagttggcagacatgaagataatatgtgtacgatcgattagccaatcttttattataaagaactttattattctggtaacaccaagttgactaatattatataatggccctaactaaaaccaatcatttctttacccgggtattcgcataagtcaaattttaaatggtaaaatcaaaatcaagaggcttatatatttagtcttaatgggagacgccacatacatcaaagaattactaccacacatctatagatatgcatgtcttctttgctattatatcgtacatgtctttttttcttcttataaaattttatcttaaattacttatttgatcttaaatctgattgcaccattgtgttcgttgcaattaaatctttataaaaaaatcttacatgattatattatgataaaaaaattatttatgtttgtaaattacttttattttatatgtagattacttttatcatgtatataaattacttttagatttgattaaattacttctcatatatacgtaatgctctgagttgattactttttattgtttttagtcaattccataatttgtgctaattaaaattaatttctagataaacttatgtttgatttacctctaatgttgtaacaacctactttcattctgtgctaattacttttatgatttatgtaaattactttcagacttcattgaatttacttttaactgcatttactttaaaaatcttctgcacactttgcttgtgaatttactctacataatttcttacttcaattcagtcataatgtaattagttctaatgttatatagagttacttctattgcttatctaatttacttctataatttaaataaattacttttaaattaataaaatgtttaaatatatttaacatggatctagttttatcacatattttgagtagagtacaatgatgcaaatagatcttaaaaataatatttgatttaaaagatactcccttcatcccaaatataacaacttttagccctcgacgtttatgccaaaatataacaacttcttcaccaacattctctttctaaccaataacaactctctacaatttaattttctcacctacctccacttctcaactaatcacaatattctctcatttaattctacctactttcttaacactcgtgtctagtataagtcattaaagaggctaaaaaaaagatatgcaccatacactaaagtaggatttatatataggactaacacactaccatgcactatcttatcacatccattttaaatatatttttggcacttcgataagagggaatatttaaaagaaaggagacacatcaccatcaccaagtaaatcgtgctacacgataatcaaagaaaataggctctatcgattttgttaaacaataataaggggcactaatcactactataaaacatcaaataggtgtccgcactataggtgccgaaagtgctaaaaccgacacctatagatcttttcccaccttcgcggtctgaaaacacaataaactagcaccttttaagtgattataggtgtcacttctaaacaaaacgacaccttttaaacaccagccgagatggccagccgagacagccaaccgagccagtggggcccaccagcgttcttttcttctctcgttcttatctcttccactctctcgttattatctcttcctctcgaactctctcagttcttctctcttcttcgctctttctcttcctcctcattcctctccacttcttccttccctcccgacgcgacccgacagcggcccgacggcagcagtggcgtgcggaggtgggagggaggcggtgggatgggaggccgcggcggccttcggtgaaggcggcagtggctggagggtggcggcgggataggaggctgcggcggccttcggtgaaggtggtagcggcgtccgcacccgcccctattccagatcaggcgggaggggaggcggtgacctggcggtgcctgccggtggtggtggagatcggcgcgtgcgaggtggcagccggcggcagcaatggcactgctggtggtggaggctggcatgggcgaggtggcgaccggccaacaagaaattttctctttttgagttctttagttcttcgtctcttttctcctcctccatttccaacatgttgagttcttgacactttgtactatacattgagtagtttgctgttcatttttgaatggggatgatgtgatttgtgatggtggtggtggagaagatggaatatgtttgggggtggtgatctgggatggggatgatgtgatagatgtgttcttggatttggggtgttcatggatgtgttcttgggtgattgggaactgctcggtgcatcggctcaaaccgatgcatcgagccggtttttttggctcgtggaaacatcttaggtgctggttgggaaccccacaaacggcacctatatttactataggtgtcagtttacagccggcacagatgacagaactcatctgtgccgtctttgtggtaccggttgggaaaattagcatctaaaaggggtttccaaccggcaccatttagggattctgtagtagtgaatgattttagcttggcgccattttgtgacagacataatcccagggttatttggttagtatcattgcagtggaggaaagactgcagagggagctacagtggaggaaagactgcagagggagctacagtgcacgcctgattaacgtcgatggtgtcaaagtagttgccgatcgggacatcacgatccaatatgttaaatgtatgtactctcttggcaagataagaatggtaactcgtgtcgagaactcgagatgtgtggaacgtatggatttaaaggtggcccacactagaaagcattttacgatctacagtcatgatagatcatctgtttgaaatcgtcatttctaaaatgatcacgaatatatattaggtcctttggcacccacggtccatcagatattccgcacactttgtctctcggggcactcgggtcagatatgttgaaatatctaggttttgataccaatctattatattattaaaggaatagaaaaaggagcctccaggttcgctctcatggtctagaaattctcacattaatcggaaaaagaaaaagcagagttcatatagaaatacaatttagaaatagctgaaattcggaattaaaaaaaatattagaagaggagactagagtccatatagaaatacaatttagaaatagttgaaatttgaaattaaaaaaataaggaatattagaagaggagactagagtccatatagaaatacaattaggaatagtccatatagaaatacaatttagaaatagttgaaatttgaaattaaaaaaataaggaatattagaagaggagactagagtccatatagaaatacaattaggaaataactgaaattcggaattaaaaataaggaatattagcagtagagtatagagtccatatagaaatacagttaggaaataatagaaattcggaattaaaaataaggaatattagaagtagagtatagagtccatatagaaatacaattaggaaataatagaaattcggaattaaaaataaggaaaattagaagtagactatagagtctatatagaaatacaattaagaaaaaaaatagaaatacggaattaaaaaataaggaatattagaagtagagtatagagtctatatagaaatacaattgtcagggttacgggtcaggcataccctctacccctcgatatacgttacatatcgacaagacctatccacgtgtacacggataaatcctttggcatccaaggaaactcttcgtaaagtcaatagacaaggagagaccttctcggacaagaattgggttacctacgtatcgtgtcaggtttggtatattcgagtcctactcggagaacacccaacctacggtataaaagggacccccggggagggcatagatgatcgaatctcagagccaacacaacccacacagcctacgaagtcagagcctgcaaggagccaagtcgacgagagctagtcgaatcatctcgactacaatcttatcgaatcccccgagttccatctttttctttgtaatctgtgttttccaccatataatcccatatcaactggattagggctattacctatcaaggggcctgaaccagtataattctcgtcttttgattgctcgatgtcatactacgtagatccttatatcaacgtaccccaataccctctatatccggtctacgggtatcccccgtcgatagtggcgcgccaggtagggggacttggtattcaaggttctactactatgccatcaagcttcgtcgacaacaacgccaacaccagctccggtcaagttcttcccacctcaaccatgctggtatggactcaagtcggcgaaaccgtctacccggtttacaccacaatgccgatctcaaccggtcccccaatgaccggaaacgagaacgcggtggctacgaaccaagacgcctccacatcgaagaatccacccgttgaaacggaaaacggattaccgactacatccaagttcgtgaaggattctgatgcggccaggccttgtccctccgacacaaaccgcgggccagcaaagatgaattccgaaactatcaggtcttggtgtcctatccataaaaccaacaaacatactcttcaagattgctgggtattcgtcaacgctcgtgctgagatccgcgcctgcaaggaacgtgggatccagcgtacttctccaacttggaacgtctattgttctatccataagacaaagaatcacgacctctcgagttgcaaagttctactcggcgccatgaaaactccgtctcctaagtcatacgtcccaatccgggataacggcaaggaacaaggagtgactccggccccagatcggttcgtcggggtaatcgatctcaatccccatgaaccatctgttttgcatctcctcgaagactatgggtcatcaacgtcagacacggcgcgggaggtgttggctatcgatgacgttggcacgtcagcacaagccaatgcggaggcggcgaatcaatcgactaccccagcccaacacattagggccgtcgaagccatactgagggaaacaccttacgatcccgttctgaacaacaacctcgagcgttggatggaacgattacggacatcggtgactaacctctgcaatgcgttcgaagaagccgctaccgcagcacagcaaaaccgatcgccagtcggcgacgctaacggcgaaattccagaacggagggaatcacctcgacaagctacccctccacctcgtggcactggcgatcttcgagatcaaatcaacggacgccgagaagcacgacgcacacgggatgacgcaaaccgctcccggcgtcatatctcctcacgacgccatgatcgaggaagtcgcctaaacgagaacagagaccatgacgatcgcgatcggcgagggccagacaacactagtcacggccgtcgccgtaacgacgaagatgaaggagattggcgtcgagacaacagcgagagacgaagacaagattcccgagatccaggtcgtcaccctcgtaatcacacgccggaaccaagcgacccatcgtcatcatcatcatcatcatccgcgtcctcttcatcgtcagatcgacatccacgaaggtcacgcgaccaccgacaacccaccgctccaagtgctgggtgcagggccttcggtcgttccctacgtgatgtccgatggcctgagagattccgacccggagctattgaaaagtatgatgggagcaccgacccagaggaattctttcaagtctactcgacagtgctttatgttgctggagcagatgacaatgcattggcaaattatttaccgaccgcgttgaagggttttgcacgttcgtggctgatgcatctccccctactcaatctcttcgtggtcagacctgtggcagcagtttgtcgccaatttccaaggaacatacaagcgccacgcgatcgaagacgatcttcacgcgttaacacagaactcaggtgaatctttgagggaatacgttcgacgctttaacgagtgcaggaacaccatccccgagatcactgacgcttctgtaattcgcgccttcaaatctggtgtcagagatcgctacactacccaggagttggcgacaaggcgcatcacaactactcgaagattattcgagatcgttgaaagatgtgcccacgtcgacgacgcactaagacgcaagaacgacaaaccgaagactgggggagagaagaagtcagtcgcagacacatctgagtcgagcaagaagaaaaatcgcaaaaaggggaaaaggaaagctcaagcagaagtcctcgcagcagaatacgcgaaccctcccaagcgcccggacccacaaggcagcgacacaaagaaatcatggtgtcccatacacaaaacagatagacattctctggaggattgccttgttttcaaaaagtcgctcgagaagcacatggcatttgaaaaaggcaagcgagtacgcgttgtcgagaagaacgaggagtcacctcctcatgaatcggactccgcgtacccggactccgacctccatgtttcacacatcttcggcggctccacgacgtactcctccaagcgagaatacaagaaagtggaacgcgaagtttgttcgatgtggcagggggatgcacccaggatgaagtggtctgagcagaagatggagttctcggaagcagaccattcctggaccgcagttatcccaggacggtatccgattgtggtcgaacccactattcggaacatcaaggtagcacgagtcctcattgacgggggcagctcgatcaacctccttttcgccagcactctggatgcaatgggaattccacaaagtgagttgacaccaactgatcaacccttccatggaattactccccaatcatcatccagacctttgggcaagattacgttacctgtaacctttggccaggccaacaacttccgaacagagcagataaccttcgatgttgctgaattcgatacagcttaaaacgccatcatcgggaggactgcacttgtgaagtttatggccgcatcccactacgcatatcaagtgctcaagatgccgggatcgaagggaacaatcactattcaagggaacgcaaaactggcggtgcagtgcgacaagcgaagcctcgacatggtcgagcaaacgcccactccacccgccatgtctgagccacccaagaaagtgagcaagctaaacaagatgccgaagccggacggtgctgtcaagatcgttccgttctctagtgctaaccccgacaagactgtcaaaatcagggctacgctagatgggaaataggaactcgcgctcatcgccttcctccgcgacaatgccgacgtgttcgcttggcaaccgtccgacatgccgggggtccccagggaggtgattgagcacaaactaatggtgcgacccgatgccaagccagtcaagcaaagactgcggagatttgcaccagatcgaaaacaagccatacgagaagagctcgaaaaacttctcaaagctggcttcatcagggaagtactccatccagagtggcttgccaatccagttatggtgcggaaagccaatggtaaatggagaatgtgcgtcgacttcacagacctcaacaaggcgtgccccaaggatcacttccctctccctcgaatagaccaactggtggattcaacagccggatgcgaactattaagcttcctcgacgcttactctggctaccaccaaatcagcatggctaaggaggacgaggagaaaacagcgttcatcactccgttcggagtattttgctacgtcaagatgcccttcggattgataacagctggcaaaactttccaacgcacggtccagggcgcacttagcaatcaacttggcaacaatgtcgaggcgtacgtcgacgacatcgttgtcaaaaccaagacaagcgactcattgattgatgacctccgggaaacgttcgacaacctccgacgatatcgtctcatgctcaatccagagaagtgcacgttcggagtaccgtcgggcaagctactcggattccttgtttctggcagaggaatagaggcaaatcccgagaagatcaaagcaatcgagaacatgaagtcgcccacaagactcaaggaggtacagaagctcaccggatgcatagcagcattaagcagattcgtcgctaggatgggagaacgaggacaaccttttttcgccttgttgaagaaacaagacaaatttgtttggacacaggaagccgaagaggcatttattgcactcaagcgctacctatcaaaccccccctgtactcgttgctccccaacctaatgaagaattatttctttatattgccgctacgccatactccgttagcactgtcattgtcgtcgagcgagagaaagtacagtgaccagtctattacgtcagcgaagctctccatggcgcaaagacaagatatccacagattcaaaaactgctctacgcagtcatcatgacatcaaggaagctacgccactactttcaagcccacagagtcacaattgtttcctccttccctcttggcgaagttgtgagaaacaaagacgttgtcggccgcatcgcgaaatgggtagtcgagctaagccaatttgatgtccacttcatgccgcgaacagccattaaatctcaggtactcgccgacttcgtggccgattggaccatgccagataacaagtcagataaccaaggcgacaatgagacatggacaatggcgttcgatggcgcactcaatagccaaggagcaggggctggatttatcttaacatctccatccggagatcaattcaaacacgcaatccatctcaacttcagggcaactaacaacactgcagaatacgaaggactactcgccgggatacgagctgcagccgcacttggggccaaacgactaatcgtcaaaggggactctgagctagtcgcaaaccaggtacacaaagactacaagtgctctaaccccgagttatccaagtaccttgcagaagtcaggaaactcgagaagaggttcgacgggatcgaagtccgacacgtctatcgcaaagacaacgtcgagccagacgacttagcgcgacgcgcatccagacgagaaccgctcgaacccggtacctttctcgacgtcctgacaaaaccctcggtaaaagaagttagcggcgaagttggcccgagcacccctgacatcagttcggaggtcaccgaggcagaacgcgctgtggctgaaatcgaaaccacggatgactggcgcaccccattaatcaaattcattagcagcgaggagttacccgaagacgatacggaggccgagaaaataacccgtaaagcaaaaatctactgtatggtcggcaatgatctatacaaaaaagcaccaaacgggatacttctcaaatgcgtctctaccgacgacggcagacaactcctcctcgacatacatgaagacatatgcgggtcacacgccgccggtcggacattggtcggcaaagcctttcgccaagggtttttctggccaacagcccttaaagatgcatgcgacatggtccagcgatgtgaagcctgtcaattccacagcaaacacacaaaactgcccgcacaagtgcttcaaacaatccctctgacttggccgttctcgtgctgggggctagatatacttgggccattcccaagaggacagggcggctacaaattcctatttgtagcaatcgacaagttcaccaaatggatcgaagcatcacccactggagaaatcaaggccgataacgccatcaagttcatcagagggatattttgcagatacggactaccgcaccgcatcataaccgacaacagctcccaattcatcagcgccgatttccaagattactgcatcggcttaggagtcaaaatatgcttcgcctcggtctctcaccctcaaagcaatggacaagtcgaaagggcaaacggcatagtactacaagggataaaaacccgcgtctacgacagactcatgtcacacgacaaaaaatgggttgaagaactcccatcagtactatgggccgtgcgcactacaccgacaacgtccaataaggaaacacccttcttcctcgtgtacggctctgaagccatgctccccggtgagctacgacatcaaagtacacgagtacagaagcattccgacgagaaccaggatgaacagcgagacatcgatgtaaaccttctcgaggagcatcatgagcgagttgccgtacgagcagcaagctaccaacaggccctgtctcgcccggaatttctatccaaaattccaaacgcttacatgtgtataaacactcgtccaggaatcagccgaggcacacaataacaaattgataatagagtacaaattattactctaattaataagcgaacaaaatgttattacagaggtagatagttcctctcaatcaataaagtcctaagcagcggaaaaaaaataaaagaaacagcgcaggcgactcctctccacaggcagcttgaccagggcttcgcctaatcatcaactccatcggcatcactgtagaactcctcctctgatgaatgattgcaaggtgagtatatgacatactcagcaagccacgcagcaagtatgcaagtgcacagggtaacaaaggatggcatagtatagtctcatttgcataaacagcatttaataaatatttcagaatttaataaaacagtggagtattaaataaacagtattaatccaacgctatacaacataccctgttgtataggcccaaccatcatgcacaaccaatcccggctgcacaagtctatctccaaaccaggagctaaacaagttaataacatcatcatttagtatagtgtgggggtgagactaatcacgaaagacattgttagacccgcccataaccgcgggcacggctattcgaatagtttaaactctgatcagaggtgtaccactgtacccacaagacacaacctcaacatcatgtcaaccatgcgtcgcgatacttgacaagtacccgaatagagattgtgacaataccctctatataatacaattcaaagcagtgcaccgttcccggatcataatcacccccttataaacaaggtatggactctccagcgacccccgtgggcttatctctgccacttcacagtctggtgctctactatgaaccatactatacagaaagtaaagccgttgcccacgctggcttgtggttggcacggtaaatgtttcacaacccaccattatcaggttttagttggcaaattaattaattaaccaatcatgattgaccatcatgagctattattaagccatcaataaataatagtgaagcataagttatcccattagcgaactaatgtctctaagcatggctaagcaattatacccaacatctagctgaaccattatataaagctcaactagtcaaattataatagcccaaggtatcaaagaataaagtaatcaagtacaaaagggccataacaaagaataggttaattccacccaatgacattcgaaaataaatgcaatagttgaatagaaacaatagctttaaataggatcaacatgctcaaagggttgtttgggatctgtgtgacttgccttgctggccttgaaaatcctcaaagtcttctcctgcaaaatcggaatctccgggaacgtcggaatctaaagagaaaagaacaaaatcaccaaaacagcacataaacaatcatgaacagtacatgtggatatttttaacatgtagatctcaattttagaaaaatttagagacttgaaccaactaaatccgagctaagatgaattagttatgaattttcaaagattaaatcgatttaaatcatttatatggattttaattgaattatgacgcaataatgaattatttttgaaaaggaaaaaggggtttattgcgtcagcgggctcggctcacggtgaaccgggtgcacggcggtggttcacgagattggacggctgagatctatcctatctacaacggacggccgagatcgattggatccaccgcggctcacggatggacgacgacgatgacgtcagcgacgacgtcaccaccggcggcgaccgaaccacacgagctcgtcggcgaaccacggcacgacagcgtgaacggaaagcacctacgggttgcaggcggcacgacgaactcaccggcgaccaaagcgacggcggacgatgaccggacgacgtcggcgacgagaaagaagcggcggcaactttcggcttgacgacggcgacggtgctccggcggtcgacagcgacggcgaaggggcggacgagaacggcgacgagacggcgacctccacgagcgacggtgatgactggagcgacggcgacgcacggctggagcggcggcggcgacggcggcgctagactgcacgggtctagggcgctacgggcggcgagggacgaaggcgagggtggcggcgggtagcggcaggcttgggggtcaatttatagcggctaggaggcggcgacggaggcccacggcgaccggcggcgggatggaaagtctagggttcggaggagagagaccgatccgaatcgacgtcgaatcaaacactttccaagcgattttagccggtgattccaaaagagaaaagatagaggagatcgagaagatcatttcccctctattgatttcatcggaaacggaaaggatcggctggattggaatggcggcggcggcgcggcgcggctagggtttcgtcgggaggaagacgacgggcctgacaggtgggcccaacctgtcagcgtccggggcgcacgcgcgcggcggctgcgggcggactgggccggcttgggctggggagagagagagaagggtttgggccgactttcggcccaaagcctaaaggaggattttaaaaacctttttcaatttaaattattcattaaatacaattccatttattaaaaatatttccttagctcaaataaatcccagaaaaatctaggaattatagaattaagcaaagtatttaataaaattttatctggccccattttatattggaatttatttattaaaattagatcttctcttctaggctttttttaaaataaattctaataattccaatttaacagcaatttataatttggagatttttagggtgtgacaaacctaccccccttaaacggaatctcgtcctcgagattcggaagcactggcgaacagatgtggatgtgctgactttaattcatcttctcgtttccacgttgattcttcctctgagtgattactccattgaactttacagaaacggataactcgatttctggttcttctctcatctgtttccaagatacggattggtttctcgacataggtcagatcctcttggacttctatctgttcaagattagcttcttcggtaggtacccttaaacactttttcaattgtgacacatggaacacattatggactcctgccaaagattgaggtaattccaactgataagcgacctctcctcttctactgacaatcttgtaaggtcccacgaaacgcggtgccaattttcccttagtgtgaaaacgatgaacccctcgaagaggcgtgacacgaagatacacatagtctccttcttcaaaacttagatctttgcggcgattgtcggcataactcttatgacgagattgagctacacgcaatctttcttgaatgattttcaccttttcttctgcttccctcaggatatcagtcccgaaaacctgacgatctcctgtctgatcccacaaaagtggagtgcggcatttccgaccatacagtgcttcataaggaggcatttgtagactagcttgataactgttgttgtatgagaattccgcgtaaggcaaattcttatcccaacttccaccgaaatctaaagcacaagctctcaacatgtcttccagtatctgatttaccctttcggtctgtccatctgtctgcggatgataggcagtactgaagttcagctgggaacccatctcttcctgaagcttcttccagaattttgaagtaaactggcttcctcgatcggatacgatcttcttaggaactccatgcaggcatacaatccttgccatatacaattccgctaaacgactcccagaataagtggtcctcaccggaatgaaatgagccactttggtcagtctgtcgactatcacccaaatagagtcatgacccgacgacgttctgggtagtccagtgatgaaatccataccgatttcctcccacttccattctggtatcttcaaaggctgcagcaaacctgcgggtttctgatgttctgctttgactcgctgacaaacatcacatactgctacatattctgcgatttcacgcttcatacttgcccacgaaaatctttccttaagatcttggtacatcttagtactaccggggtgaatggagtataaagtatcatgagcttcctttagaattgcatccttcaagtctttgttgtctgggacacagattctctcacccaaccatacagttccttgctcatcttccaagaaaccgatagctttacctcttctcatattcttcttgatctccagaatatcaggatcattaatttgggcttctctgacttgatcaatgagagtaggcttcgcttctaaagctgcaacaaagcctctgctgacaattcccagattcaacctttcaaactccttgcacaattccaaaggcaactgtcgtcctcccataacattacaatagccttttctgctaagggcatctgctacgacattagcctttcccgggtgataatgaattcccaggtcataatccttaatcaattccaaccatctccgctgtctcatgtttagatctggttgggtaaagatatacttcaaacttttgtgatccgtatacacctctgtatgagtaccgaaaagatagtgacgccaaatcttcaacgcatgaaccactgcagctaactcaagatcatgagtagggtagttcttctcatgcggacgtaactgacgagatgcataggcgaccaccttcccatcctgcatcagtacacaacctaacccaagcttggatgcatcgcaatacacttgaaaacccttctttggatcaggcaaaatcaaaataggagctgatattaaacgattcttcaactcttgaaaactctgctcacattcttctgaccacttatacttcacatctttttgaagcagtcgtgtcatgggcttggcaatcttggagaaattctctatgaacctccggtaatatcctgcgaggcctaggaaactgcggatctctgaaactgtcttgggttgtttccagttggttacggattccacgttactaggatcaacggcaactcctcctgctgagatgacgtgaccaaggaactttacttcagacaaccagaattcacatttgctaaacttggcatacaactgatgttctcgcagcttctctagtgcaaggcgaagatgttcttcatgctcttctttagttcgggaatatatgagaatgtcatcaataaagacaaccacgaacttatccaggtattccatgaacaccttgttcatcaagttcatgaagaaagcaggggcattggtaagtccaaaagacataactgtacattcaaacaacccataccgagtagtaaaagctgtcttaggtatatcttcctccttaatccttaactggtgataccctgatcgaagatctatcttggagaaaatggtggcacctttaagttgatcaaacaaatcatcaattcttggcagtggatacttattcttgatagtcacatcgttaagtgcgcgataatccacacacatcctctgagtatggtctttcttttctacaaagataacgggagctccccatggagatgaactcggtctgatgtatcctttttgaagcaaatcgtcgacttgccttttgacttctgccaattcattggctgccatcctataaggtcttttatggatcggagttgttcctggtaccagatctattctgaattctatatcccttttaggcggcataccaggtaaatcatcggggaacacatctgggtactctcgtactataggaatcttttccaacgttatttggttcaggcttgaccttagaggttcagaaggcaatgcatgaacagttacaacttgaccatcattgctggtaagagtcacttttctattagcacaatctatcacacctttatatctggctaaccagtccatccctaggatgacatcaagatctttagattctaacagaataaggttggccaggaaggatacaccttggatctctattctgacagaggggctacgttgtgaggagagtgcttggttactcggagtactaaccatcaaaggacgtctaagttcctctacctccatcccatgatttcccgcaaaactcatggataaaaatgaatgcgtagcaccagagtcaaaaagcacggttgcaggaactgagttaacagggaacgtacccaaaatcacatctggagcaccttgagcttctgtagcagcaacatggttgacacgagccttggctgctggtgcggaggagttgttctgggcagggacgacctttgcgcggcggggcttcggacacttgtcagcataatgtcctgggtctccacagttgaagcacacaccgggcttgctgccttgctccctcttggcaggctgttgctgcgacggagttgccaccggacgtggagcttggttgcggttgttgttgcccgcgttgttgttgaagaactgacgctgcggacgaacaacagatgaagaacctccctgtggcatggactggggtcccaaagtaaggcgtggcctctgactattcccctgctgtgccttgaaatgagcaatccggcgcttcttttgctccatgcgattgtatttgtcctcctgacgaatagctttatccactaacttctggaaatcatgataatctccagtcataagtgggtaggagagctcatcattaagtccttccaagaatttctcctggcgctcctcatcagtgcgcaaatccttcggagcataacgagccagacgattaaactcgtgcaggtactccgtgacagtgcgggaaccttgtgtgagcgaccttgtcggtgacatgggaccgggagtatcatgactagaggcttgggcaggagcaatcacccacgaggcctgaccccctcgggggggtcgggcccgagggtgatgtggccgcccccctctttgtctccccgaggggtcggaccgctcccgtttcggccccgagggttgaggcgccccgaccccttgggggttttgcgctgcgtgtctgggttaggcgagcgcagcggggctcacctaaccgcatttattgcggtttggtcaagcgcgtcacgccgcatgtaacgcagtgcagcgcgctcgtttatccggtctgtgaccagtcacagaccgatcagatcgtggattaggtggcgacaggcggtctgacacacgcctcgctccatcccgtcaagatgagagcctccaagcactcgtccctagccggagccagcgtgttacctcctggagatggcacgttggtcccggtcagatatatgccaggcttcatcctaaccattacaagcaagatattgtatgaagaagggcgaacatgcagattgataaactgacgcgtggtggacaagaatgaccgatttgtgaccggtctgacactggtcatatcgtcagcagacagccatgttcccacgtcgcgcctgcttccggcggaagtggaggtaggtatgggccgtcccatcagaaggtcattcagacggcaaccatacaaatctccgtccatttatgaaaagataggataagtccccacacaaaagagagagatggtgcatgtggtatccccttgagatataaaaggaggaccttgcccacttagagaagggggaggggacgagagaaaaagaaggggggattgggatccagaacgatcgaggctggattgggaaccagaagagagggtttctgtcacgtcctgataaattcatcccgaaataaaaatcattttctaaaaggaataatagaattaattaaaattcgaaaagaaattggcaaacattaaaatacgtacaagaaaaattcaaatgtggcccggcgaatttttgttaaattctccttggtcaaaaaggagccctcaaattttagtagaattttcagagcacaaataataattattaagaaataaacaaagttaaaatgattttataaaaagaaaaaccctaaaaagtcttttcccccctccccctcttgggccggctcggcccatctccttccctctctctcctcctccccgcggcccactcggcctctccccgcgcgcgcgccgctgacgggcgggcccgcccgccaccctcgctgacgggtggggcccacctgtcatccctatcctcccgccgctcccgccgccccgcccgcgcccaagcgccgccgccgccgcgaatcccgccgcctcccgccgtccccgcgcgcaataaagtggggggaattattccccgcgattccctccgtctttccccccacttttccctctctctctccatcggattcgttcgggatctttccccctaaacctcgccggcgcatcaatggcggccggaccttccgcgcccgtttccccctcctccggccgctctctccccctcccaaccctatataaaccctccccgtgcctccctccaccgtttccgccactcgccgctctctctctccaccggaatcgagctcacgccgtcgctctctctctccgccatcgccgccgagctccggtccgccgccgtcgtcgccccggaccacctcccgcctcggcgttgccaccttcggcttcgccgcgtcctcgccgacctcgtccacctctccgtttcggtcgccgatcgccggaacgccgccgtccccgtcgacccgagccgcgccgccgcctctctccgctccggtcgccgttcccgtcgtcgccgtcgatccggggtgagccgtggaccgccgattcgtttcccccttccctcccctctctcgggcgccgccccgccgcgccggtggtcgccggcagcgaccatcggggcgcgggtgcgccgcctcccgtcggctgtgccggcgaggccgccttcgggcgcgccccgcggctgccatgtggggcccggccgtcagccgcccgcgccctcgggtgcggctgacgcgtgggacccacggcgccggccggtgtgagccgggtagacccggtccaccgtgggccgtgaggctgccgcgtgggccccactcccgtggacccggtccgcgcgcccctccccttcggctgacgcaataaatccattttaaattaaaatttaaatgaagaaattcgcaaatatctattatatactaaaagtctatgaaactttctaaaaacactctcaaatcgccatgtggcttccttaaaacgctcctaaatcgccacgtggcattataataaatagagaaaattcgaaccattgattttcacttaaaataggtggacccattattttgagccattagatttaagctaatccgtatcctctcatctccgaacgccgcgtacctcctccccgcacgcaagacgtagatagctaggtacgcatctactcctctccatctccccttttttctccaagtttgttaagctacaaagcataatttgttacaataagttagagatatggagcctgcaggagctcgctgtgcaccatgcatgctacctaaattataggagtgatcacagtgatacacttgaactacacattcagtttattatacacttgaactactgttttttaatcaaatcaacggtttaagactcatattagttagctatattttggtggtaaagaattattacatgttggtctttttcaatttatcacatgcacgtatcattttcatgagtcctccccaaaattgaaggaaaccctaagaatttccttcaatatcaagtctaattttttattcaaatcggtggatcaattatgatacaataaggcaatagtaactaattaactacatacgtactctctcctcctcctctcctctctcattcaattcttcattcttctaatttttaactaattagcaacttaatataaaaacaaaaaataattagaaagctaaatgattataattcttaagttatatatggtttttaagttcaacaatataaaagtaaaatatattacttcacaaatataaatatatttagtaaaattaagatctatatatgataaatatccaatcaatgttctttaaaatatcttctaaataattcaagatctatattacccaatttcactgtaaataatacgtcatttgtagacacctatgcgtgtcaaccaaataaaaaaaatcaaacaaactatatcaccttaaatcatcgtacattctcaatagagcacttacatgtcacgtgttatgtcttaaattaaaaacaaaatcttagaaattatagaaaaacacatttgaccaccggttatgaattaaatatgtatatccattattttaaaccattagatctattttttttaaaaaaatcttaagccgctaggtgttacattttaataattaaaaaatattattcgaaattttaggaacaaaacaataaatcatcggtttttatttaaatcatttataaaaactaggaaataaaccccgcccccaccccccaaactttaccccctcctcacatatgcacaaacacaacactacccgtcccctcatcccccggctcgcactttcccctataccctccttgatatttttataaccaataaaaagagaaataatcaataatattaaagcatacatatcttttgagccacacatctgattctaatataaattgctctatttataattaaaccaacaatttaaagatccataacgcctatattttaaacttaatttttcactaaaattagaacaattatacatgttcctattttttaagtgcttagatattattgactttcatgacattatgagttcctctgcacattattgtatatatataagccacacaatgtttgcggtttatagttggttgagaagttacatttgtaattactaaaatgttcagactcatattgactaggtattttctttttttttaaaaaaagaaagatactatagatcacacatatattagggaagggagatctatgatatatctttagaaatttatatataaatatataacaaattgcgtcaataaaatatattcattaaaaaataaaatatattcattttcaataatagttatttaggatttgctaaaaaaaagaaagaccctaaacattttattaaacaagacaaaacatcacatgtttccaaacaaattaaatctaactactttctagataacgaagagatcatagataattgtttatatgaatgtattaaatattatgtattttaaaagctaacaaatagattggaaaaattatctaagcaacactgatgagataagttatggataaacagtacttatgaaatgacaagtgtcatctggctgatattctgccatcttatatatttttttcaaacataacatataaacttcaaatggccataacttggccatttgaactcggaattggaccgttcaagtctctaatttttccttaagaagtaaagaacccatttttgtgctttgtttctgcttgttatatggagtttattagagtaaaagccttttcttttccgttggtcgtgtagacacttcagcttcggaagatccgctcttcgtggaagttgaagccgacgtttgggaaagcgagcaaggcaagtcacatcatccttgagcatattgaatcccagtttataaaattattttgatttaaattaatgcattatcgctttatttaaattcccgcgttatcactgttttatttagccatgcctatttacctttgttaagacattattattgctattgttattattaccttgttcaccctagaataaacaaaaccccaactagtggacactctactcatggtaccactagcatgattttaggtagatgcttcgctatttttaattaggtaactttaggtggtttttcaactctagacttggggatattcatatcacctggacactttggaattgttggtttattgtggaattggcttcacaccgctccttctattcaaaatccccaaaatggttttaggctgggctcggggtgcatggttttgatagtagcacctcggccatataaggaccggtcttcgggcctctcactacaacaaaacaacccaaaggagacatcttatttgtaagatagagacgttttatttcgtctcccacagataactgagacgcttttataaagcgtcgtaggatcgtctctgtttgcaccgtctcaaaattatggagacgctttttaaagcgtacctatattatttaagacgttggtagagacgtgtaaattgcatctctataaaatatagagacgcttttatataggcacgcacatcttaatatatttgatattaatgctttcatctgggctcgaacacagcacctgcaggttacaaagttcatgcactaaccaagtcattaacgtgacaatcttgaaggtaaatagatagttttttttatattgcaactctgcaaacatgcgtcctgtagcagttctcttcttttttaatctaagactgaatattaaatatttattttttttggtccaaataattataatattattataatggtatttgatgatgacgattaggatcagtgtgtttattttcttctttctctatataaataattatatattatctaataacgatgacacggatataataaaaacgtctcaaaactcatttctacacatgagatgttccaaaaacgtctcaatattcatctctaaacgatttaattttgtgctaacctgtaaagcgtcttaaactatgtcctcaactaataaagcgtctcaaacatcgtccctattttaatttcacttataaaaaagagacgacttatagaatgacttaagtgaaacgtcttaaaacaatggttttgttgtagtgtctgttgcaaagcactaccgtacttccacatgtctagtgggtaaggcttagtttgtggctcagtctggttataaacaaaagtacacggatggagatggacgaagtcgggggtcgatggacatctctaggacaaatgaaggctacacgagctgcggcccggtagtcgagatgtcatggcacagggctggtgtcctgctgctaggggctcaatcctgtctacctgtcccggaggttccggccgtaggtggggttgggtcggtactcttgtctatggctaggatgggttggaaactatgtcacgtcttccgtccgtataccgtggtggtatgtggcacgtggttacacgtgaggaagatgtgtcttgtgggtaaagatgtacacctctgatcagagtataatctattcgaatagccgcgccctcggttatgggcaagccgagcaatgtacccaagttagtgtttaattcttaaaatttgctcaataactaaaatgtggaatggttggcctgggttggcttgggacgagctgggacctagggtcgggttgccagttcggtctgaatcatcgtaggccttgggttaaggcaggttcgtgagggttcacggccttgattaataatacggtgtagctttaggatcgtctttttaaaatggctttgggcaactaagtgacttttaactgctgttttctgcaaaacttaacccctatatcattaccccttgtacccccttgcattaatcgtgcatccgccggtgtggcttgctgagtactgtggttgtactcactcttgctcaatctttctccccccttcagtaagagaagctttggagaagaagtcttaggtggagtcttggcttataccccagttgagcgcctgtgaagatggagccgtaggcccgctagtccgctgctgtttatttttgattgtcaggccttaagtgcctttgtaataatgtaaatattatcgatataataaagatgtgtcttttatatcatgattgtatggtgtaccccggcttttcctgggacggggattaatacactagcgttcgggaaaatgcaattttctcggtcgcgacaagatggtatcagagccatctcgactgtaggataagccaagtggataaaacctaaggacatattttataaataaaactatttgcgaaagttccttttttttctccttcccctagtgctatttgcaaaatgtttactcccttcttccttcttcggatttcaattagtactagttggtcagctttgtgaagaagaagatgtcgtcaattgtctgccgaagctccagaaggctgcaggatccgctagtggagtgaaggaagcagtgaagccagctgtgaagcaggagtgaagatcttggagaacccgtcgcagaacctaagccaccctctagtgtttcgtttgtcgtgtgtttccttgcttgtgtgtgtagcgcgtggtttgcatcagtgggttgtgatgtaaccatgctaggttgtttgcttaaccaacttgcagaataagcctaacatacatcataacagcaaaagacttagatctgttaaggtcctatccttagtttctaatctgtctctccccttttgttttccctctctccctctccaaacctttgcaacagatggctgacaatgagaaaggcaataaggtcagaagtcaggacattggtacctcaagctcccgagtgaatgaagcaccagacaccagttgtgtgacactggtccaacacctgattaaccagaaccgattgcttatagagatactacagcagcatcagacgccaattctgaacctgagtcagatacaacctcaagtgcagttggaggcagtccaagcactcacaccacaagtcagcatgccgccagcatcccgaaggacccatggtgacgtgccacatgttgactcaaaagaagcaagtatcatttgttttatgtgtgatgagcaagggcactatgcaagggagtgtcctcagcagaaaagaaaaacaccaatgcgaaccgaagatgaagtccgtaagatgatcattaccagcacagaatggcctccaccaggaatgacaaaacgtcagagaagaaataccttccgaggtgcaccacagttgacagagcatcttttagctaatggaggtagagtgtctgatagtgaagattcagatcaagtctcctcagatgatgaagatgagaagtctccccaaggtttcaaccagaataaaatggaacataaggcatgctctcgttgtggagaaatcggtcatgttgccagctcgtgtgccactacatgcgttcattgtgaggaagaccatccacccgacaggtgtccaacgagcaggatcacttgtttcttttgtgaaggaactgatcatgtaccaaaagattgtcaattcagttttctgctgacgaagaagatggccaaccaacccgccagttccaacggagagaagcatcaaggcaacacaaatcctcgccaagattacagtttcagcctaactccagtgccaggacagaggaatcaaaatgagaaaagaaaatgccgagtccgggaagatatctgttgcttcaattgtcaaggaatgggtcatttcgccgacaagtgcccaaaaccgagaaacatagctgccagcacgtcagtccacgcaactccctgcaatcagaagcttgctcctcagcgaattgtcatccatgcatcccgaagcagtcctatagcccgcgttgcaatagctcaaactccagcgagtgcattaccacaaggtgtcaatgctcaatttcagccccagccaccagttgacaagatagaggccaatatcggcattgtacctttggatgttccagcacagcagccaagaaatcaagtacaagatgaagaacccaagccaatgggaatgagaaaggcatcaacgaaaccttaccagagctaatccaaattgtggttaaccaaaccaacatggtggcaacagcctttccactattacagaattggaaccacccagcaggggcaaccaacgttcaagtacctacagtccagcaacagtgcaagttatcagaatttctcaaaactgagcctccaacctttgccattgccgtcgatcctatggaagccagtgattggttgcgcatagtcgagaagaagctggggttgattcagtgcacagaccaggagcgggttgtcttcgcaactcatcagttggttgcactggcttcagaatggtgggatagctacgaagcatcacggccagaaggacataccatcacctgggacgagttttcatctgtattcaagagatcacatgttcccgcaggaatgatcacactgagaaaacgagagttccgctacctgaagcaagaagatttgaccgtcacagagtacctgcacgagttccatcgtttggctcactatgcaccagaagatgtggaaaatgatgaagaccaacaagagaagtttctccaggggttaaaagatgagatcgcagtgcaactactcctagaggaatatgaagattttgagaaacttgtggacaaagccatacaactcgaaagtgagcataatcggatgaagaactgtaagagaaggattgtcagcatcccagtatttccatgtggtaaccaaagacagcgcactgagccacttcagatcaccggatcttctattgcgcatcaagagtttccgccccaagaagatggacccaatgcagacaacaacattagcaatactaatgatgatgatgataccaccaacaaccatgcttcttgccccattagtgaccactcgaatcgagcgtgcaatgtcaacatcattcaccaagatgtcgacgatagtatcaatgatggcacccaaaatgacaaccctagcagttgtgactctgagaaagactccgatggtgatagcaactatggtaccactgatgccaatgttagcaaggatttccagccaccaattccaactccaagtcagaatgatcgtccccagacggatagctcagcaaagaagacgttgatttgctacaattgcaaagaactagggcattactcgagggactgcctgcaaccaaggcaaagtcgacctccacattaccgccaatttacacgaagcagacatcccaatcgtattgtggtcactggagcaaacgccgtacccgtgaggcctcgtgttaatcagaacccatagcagaaacaatgtaccaatgctaagcacctttccttttaggcagtgcttagtattcatgtaatgagggagaaatgtgtaatacagacaagttctatgaggattcttttggaagatgcggatatgtgattatgtgtataattgcttactgataaaggagacctagggtctcatttcagaggaactatgttctaaccttgagttaataaccaacctaatgatggaaaagaaaatcaagttattaaccaaagagacatttgtttggactaagtgtttcagatgtgtcttctttggatcaaaggcaacaaccgtcagtctagcttttgatgaaccacttgaaggttctctgaaaggcagcaggctcaagtaccacattgtcaccagaagcatccacaactcttggagtgaagagtacttggttgacaaagttcaaaaggtgattgatagaagataccagcaaaggtgtttattaccgggcaaagaagtaggtcgaaaggtgattgataagagaaatctgaaaagaacacatcagggttgaatgtgtaaaggaatactttgaatgctaaatgataacaacataaagagaatagtgggaagtaaactaaatgtaaagaaagtgaatccgagctgcttgttcgtgagagccattcccagttatggaacaagtgatatgtttgaagataatctatagaggtcagatcaaaatcacatctaacaacgaagcttcagatctggcaggatcacgatcagacaataacaagtccagcagcaaagtcattcgggaagacgtcaaagcatgtcaagtgggataagttggttctcttgggaagcataatttatagttagagtggttgacccttgcatcgaatagcagaagtacctagcaccggagaccaggaaagctaatatgagacagttaatggcaagttgtcaatcatggtatccttagtaagcgggatatcatagtctaaagcatatggtggtaagctggaaggaaacgcaaagcatggtattctcatgatgacaagcaggttacgacacacgacatgaagttgataacttgtgtgaggttgacgccgaagatatgaatcgtgagaagttctggaacggaagcatcattaaactaccgcaacctagtctgcgtcagctaaaaggtgcaccctggttcaagtcaggtgaaaagaagattccatctgcaacaggagatcaagccaagcagttcagagtggggaagttttgctgggaaagtacgttcaagaagatgcaacggaagaagtcagatcataaaagaagaccgcccaacctatcttcttgctagcctcctcgaatctcggggacgagattcttgtaaggggggtggatttgtcacgtcctgataaattcatcccgaaataaaaatcattttctaaaaggaataatagaattaattaaaattcgaaaagaaattggcaaacattaaaatacgtacaagaaaaattcaaatgtggcccagagaatttttgttaaattctccttggtcaaaaaggagccctcaaattttagtgaaattttcagagcacaaataataattattaagaaataaacaaagttaaaatgattttataaaaagaaaaaccctaaaaagtcttttcccccctccccctcttgggccggctcggcccatctccttccctctctctcctcctccccgcggcccactcggccactcgggcccgagggtgatgtggccgcccccctctttgtctccccgaggggtcggaccgctcccgtttcggccccgagggttgaggcgccccgaccccttgggggttttgcgccgcgtgtctgggttaggcgagcgcagcggggctcacctaaccgcatttattgctgtttggtcaagagcgtcaccccgcatgtaacgcagtgcagcgcgctcgtttatccggtctgtgaccagtcacagaccgattagatcgtggattaggtggcgacaggcggtctgacacacgcctcgctccatcccgtcaagatgagagcctccaagcactcgtccctagccggagccagcgtgttacctcctggagatggcacgttggtcccggtcagatatatgccaggcttcatcctaaccattacaagcaagatattgtatgaagaagggcgaacatgcagattgataaactgacgcgtggtggacaagaatgaccgatttgtgaccggtctgacactggtcatatcgtcagcagaaagccatattcccacgtcgcgcctgcttccggcggaagtggaggtaggtatgggccgtcccatcagaaggtcattcagacggcaaccatacaaatctccgtccatttatgaaaagataggataagtccccacacaaaagagagagatggtgcatgtggtatccccttgagatataaaaggaggaccttgcccacttagagaagggggaggggacgagagaaaaagaagggggggattgggatccagaacgatcgaggctggattgggaaccagaagagagggtttctgtcacgtcctgataaattcattccgaaataaaaatcattttctaaaaggaataatagaattaattaaaattcgaaaagaaattggcaaacattaaaatacgtacaagaaaaattcaaatgtggcccgaaaattttttgttaaattctccttggtcaaaaaggagccctcaaattttagtggaattttcagagcacaaataataattattaagaaataaacaaagttaaaatgattttccccccctccccctcttgggccggctcggcccatctccttccctctctctcgtcctctccgcggcccactcggcctctccccgtgcgcgcgccgctgacgggcgggcccgcccgccaccctcgctgacgggtggggcccacctgtcatccctatcctcccgccgctcccgccgccccgcccgcgccctagcgctgccgccgccgcgaatcccgccgcctcccgccgtccccgcgcgcaataaagtggggggaattattccccgcgattccctccctctttccccccacttttccctctctctctccatcggattcgttcgggatctttccccctaaacctcgccggcgcatcaatggcggccggaccttccgcgcccgtttccccctcctccggccgctctctccccctcccaaccctatataaaccctccccgtgcctccttccaccgtttccgccactcgccgctctctctctccgccggaatcgagctcgcgccgtcgctctctctctccgccatcgccgccaagctccggtccgccgccgtcgtcaccccggaccacctcccgcctcggcgtcgccaccttcggcttcgccgcatcctcgccgacctcgtccacctctccgtttcggtcgccgatcgccggaacgccgccgtccccgtcgacccgagccgcgccgccgcctctctccgctccggtcgccgttcccgtcgtcgccgtcgatccggggtgagccgtggaccgccgattcgtttcccccttccctcccctctctcgggcgccgccccgccgcgccggtggtcgccggcagcgaccatcggggcgcgggcgcgccgcctcccatcggctgtgccggcgtggccgccttcgggcgcgccctgcggctgccatgtggggcccggccgtcagccgcccgcgccctcgggtgcggctgacgcgtgggacccacggcgccggccggtgtgagccgggtggacccggtccaccgtgggccgtgaggctgccgcgtgggccccactcccgtggacccggtccgcgcgcccctccccttcggctgacgcaataaatccattttaaattaaaatttaaatgaagaaattcgcaaatattcatttaaagagcatataaacttcaaatggccataatttggccatttgaactcggaattggaccgttcaagtctctaatttttccttaagaagtaaagaacccatttttgtgctttgtttctgcttgttatatggagtttattagagtaaaagccttttcttttccgttggtcgtgtagacactgcagcttcggaagatccgctcttcgtggaagttgaagccgacgtttgggaaagcgagcaaggcaagtcacatcatccttgagcatattgaatcccagtttataaaattattttgatttaaattaatgcattatcgctttatttaaattcccgcgttatcactgttttatttagccatgcctatttacctttgttaagacattattattgctattgttattattaccttgttcaccctagaataaacaaaaccccaactagtggacactctactcatggtaccactagcatgattttaggtagatgcttcgctatttttaattaggtaactttaggtggtttttcaactctagacttggggatattcatatcacctggacactttggaattgttggtttattgtggaattggcttcacaccgctccttctattcaaaatccccaaaatggttttaggctgggctcggggtgcatggttttgatagtagcacctcggccatataaggaccggtcttcgggcctctgttgcaaagcactaccgtacttccacatgtctagtgggtaaggcttagtttgtggcttagtctggttataaacaaaagtacacggatggagatggacgaagtcggggttgatggacatctctaggacaaatgaaggctacacgagctgcggcccggtagtcgagatgtcatggcacagggctggtgtcctgctgctaggggctcaatcctgcctacttgtcccggaggttccggccgtaggtggggttgggtcggtactcttgtctatggctaggatgggttggaaactatgtcacgtcttccgtccgtataccgtggtggtatgtggcacgtggttacacgtgaggaagatgtgtcttgtgggtaaagatgtacacctctgatcagagtataatctattcgaatagccgcgccctcggttatgggcaagccgagtaatgtacccaagttagtgtttaattcttaaaatttgctcaataactaaaatgtggaatggttggcctgggttggcttgggacgagctgggacccagggtcgggttgccagttcggtctgaatcatcgtaggccttgggttaaggcaggttcgtgagggttcacggccttgattaataatacggtgtagctttaggatcgtctttttaaaatagctttgggcaactaagtgacttttaactgctgttttctgcaaaacttaacccctatatcattaccccttgtacccccttgcattaatcgtgcatccgccggtgtggcttgctgagtactgtggttgtactcactcttgctcaatctttctccccccttcagtaagagaagctttggagaagaagtcttaggtggagtcttggcttataccccagttgagcgcctgtgaagatggagccgtaggccctctagtccgctgctgtttatttttgattgtcaggccttaagtgcctttgtaataatgtaaatattatcgatataataaagatgtgtcttttatatcatgattgtatggtgtaccccggcttttcctgggacggggattaatacactagcgttcgggaaaatgcaattttctcggtcgcgaccgtttctagagtgaaagctctctggttcttcagctctttgtagcttcttcatacacagatccaccagaacacaggagtagggtattacgcttctcagcggcccgaacctgtatacatcgcccgtgtcttgtgcttttttccactctcgcgaactttccacagactaggagcttagaatctcacccagggccccccgccgaaccggcaaaggggggcctgcgcggtctcccggtgaggagccccacgctccgtcatctggcgcgccaggtaggggactctgcgtgtgtttttctaagctctcgcattctttcgtgtacgccaagcttttcctgttcagcccaatgtccgaacaagcaaaggcgcacaacctctctccgagtgttagcggtgacgacggggaaccgaacccacgccatcgagctcgtactcccgatgatcgctacactacccaggagttggcgacaaggcgcatcacaactactcgaagattattcgagatcgttgaaagatgtgcccacgtcgacgacgcactaagacgcaagaacgacaaaccgaagactgggggagagaagaagtcagtcgcagacacatctgagtcgagcaagaagaaaaatcgcaaaaaggggaaaaggaaagctcaagcagaagtcctcgcagcagaatacgcgaaccctcccaagcgcccggacccacaaggcagcgacacaaagaaatcatggtgtcccatacacaaaacagatagacattctctagaggattgccttgttttcaaaaagtcgctcgagaagcacatggcatttgaaaaaggcaagcgagtacgcgttgtcgagaagaacgaggagtcacctcctcacgaatcggactccgcgtacccggactccgacctccatgtttcacacatcttcggcggctccacgacgtactcctccaagcgagaatacaagaaagtggaacgcgaagtttgttcgatgtggcagggggatgcacccaggatgaagtggtctgagcagaagatggagttctcggaagcagaccatcccaggaccgcagttatcccaggacggtatccgattgtggtcgaacccactattcggaacatcaaggtagcacgagtcctcattgacgggggcagctcgatcaacctccttttcgccagcactctggatgcaatgggaattccacaaagtgagttgacaccaactgatcaacccttccatggaattactccccaatcatcatccagacctttgggcaagattacgttacctgtaacctttggccaggccaacaacttccgaacagagcagataaccttcgatgttgctgaattcgatacagcttaaaacgccatcatcgggaggactgcacttgtgaagtttatggccgcatcccactacgcatatcaagtgctcaagatgccgggatcgaagggaacaatcactattcaagggaacgcaaaactggcggtgcagtgcgacaagcgaagcctcgacatggtcgagcaaacgcccactccacccgccatgtctgagccacccaagaaagtgagcaagctaaacaagatgccgaagccggacggtgctgtcaagatcgttccgctctctagtgctaaccccgacaagactgtcaaaatcagggctacgctagatgggaaataggaactcgcgctcatcgccttcctccgcgacaatgccgacgtgttcgcttggcaaccgtccgacatgccgggggtccccagggaggtgattgagcacaaactaatggtgcgacccgatgccaagccagtcaagcaaagactgcggagatttgcaccagatcgaaaacaagccatacgagaagagctcgaaaaacttctcaaagctggcttcatcagggaagtactccatccagagtggcttgccaatccagttatggtgcggaaagccaatggtaaatggagaatgtgcgtcgacttcacagacctcaacaaggcgtgccccaaggatcacttccctctccctcgaatagaccaactggtggattcaacagccggatgcgaactattaagcttcctcgacgcttactctggctaccaccaaatcagcatggctaaggaggacgaggagaaaacagcgttcatcactccgttcggagtattttgctacgtcaagatgcccttcggattgataacagctggcaaaactttccaacgcacggtccagggcgcacttagcaatcaacttggcaacaatgtcgaggcgtacgtcgacgacatcgttgtcaaaaccaagacaagcgactcattgattgatgacctccgggaaacgttcgacaacctccgacgatatcgtctcatgctcaatccagagaagtgcacgttcggagtaccgtcgggcaagctactcggattccttgtttctggcagaggaatagaggcaaatcccgagaagatcaaagcaatcgagaacatgaagtcgcccacaagactcaaggaggtacagaagctcaccggatgcatagcagcattaagcagattcgtcgctaggatgggagaacgaggacaaccttttttcgccttgttgaagaaacaagacaaatttgtttggacacaggaagccgaagaggcatttattgcactcaagcgctacctatcaaaccccccctgtactcgttgctccccaacctaatgaagaattatttctttatattgccgctacgccatactccgttagcactgtcattgtcgtcgagcgagagaaagtacagtgaccagtctattacgtcagcgaagctctccatggcgcaaagacaagatatccacagattcaaaaactgctctacgcagtcatcatgacatcaaggaagctacgccactactttcaagcccacagagtcacaattgtttcctccttccctcttggcgaagttgtgagaaacaaagacgttgtcggccgcatcgcgaaatgggtagtcgagctaagccaatttgatgtccacttcatgccgcgaacagccattaaatctcaggtactcgccgacttcgtggccgattggaccatgccagataacaagtcagataaccaaggcgacaatgagacatggacaatggcgttcgatggcgcactcaatagccaaggagcaggggctggatttatcttaacatctccatccggagatcaattcaaacacgcaatccatctcaacttcagggcaactaacaacactgcagaatacgaaggactactcgccgggatacgagctgcagccgcacttggggccaaacgactaatcgtcaaaggggactctgagctagtcgcaaaccaggtacacaaagactacaagtgctctaaccccgagttatccaagtaccttgcagaagtcaggaaactcgagaagaggttcgacgggatcgaagtccgacacgtctatcgcaaagacaacgtcgagccagacgacttagcgcgacgcgcatccagacgagaaccgctcgaacccggtacctttctcgacgtcctgacaaaaccctcggtaaaagaagttagtggcgaagttggcccgagcacccccgacatcagttcggaggtcaccgaggcagaacgcgctgtggctgaaatcgaaaccacggatgactggcgcaccccattaatcaaattcattagcagcgaggagttacccgaagacgatacggaggccgagaaaataacccgtaaagcaaaaatctactgtatggtcggcaatgatctatacaaaaaagcaccaaacgggatacttctcaaatgcgtctctaccgacgacggcagacaactcctcctcgacatacatgaagacatatgcgggtcacacgccgccggtcggacattggtcggcaaagcctttcgccaagggtttttctggccaacagcccttaaagatgcatgcgacatggtccagcgatgtgaagcctgtcaattccacagcaaacacacaaaactgcccgcacaagtgcttcaaacaatccctctgacttagccgttctcgtgctgggggctagatatacttgggccattcccaagaggacagggcggctacaaattcctatttgtagcaatcgacaagttcaccaaatggatcgaagcatcacccactggagaaatcaaggccgataacgccatcaagttcatcagagggatattttgcagatacggactaccgcaccgcatcataaccgacaacggctcccaattcatcagcgccgatttccaagattactgcatcggcttaggagtcaaaatatgcttcgcctcggtctctcaccctcaaagcaatggacaagtcgaaagggcaaacggcatagtactacaagggataaaaacccgcgtctacgacagactcatgtcacacgacaaaaaatgggttgaagaactcccatcggtactatgggccgtgcgcactacaccgacaacgtccaataaggaaacacccttcttcctcgtgtacggctctgaagccatgctccccggtgagctacgacatcaaagtacacgagtacagaagcattccgacgagaaccaggatgaacagcgagacatcaatgtaaaccttctcgaggagcatcatgagcgagttgccgtacgagcagcaagctaccaacaggccctgtctcgcccggaatttctatccaaaattccaaacgcttacatgtgtataaacactcgtccaggaatcagccgaggcacacaataacaaattgataatagagtacaaattattactctaattaataagcgaacaaaatgttattacagaggtagatagttcctctcaatcaataaagtcctaagcagcggaaaaaaaataaaagaaacagcgcaggcgactcctctccacaggcagcttgaccagggcttcgcctaatcatcaactccatcggcatcactgtagaactcctcctctgatgaatgattgcaaggtgagtatatgacatactcagcaagccacgcagcaagtatgcaagtgcacagggtaacaaaggatggcatagtatagtctcatttgcataaacagcatttaataaatatttcagaatttaataaaacagtggagtattaaataaacagtattaatccaacgctatacaacataccctgttgtataggcccaaccatcatgcacaaccaatcccggctgcacaagtctatctccaaaccaggaattaaccattccaaaccaggagctaaacaagttaataacatcatcatttagtatagtgtgggggtgagactaatcacgaaagacattgttagacccgcccataaccgcgggcacggctattcgaatagtttaaactctgatcagaggtgtaccactgtacccacaagacacaacctcaacatcatgtcaaccatgcgtcgcgatacttgacaagtacccgaatagagattgtgacaataccctctatataatacaattcaaagcagtgcaccgttcccggatcataatcacccccttataaacaaggtatggactccccagcgacccccgtgggcttatctccgccacttcacagtctggtgctctactatgaaccatactatacagaaagtaaagccgttgcccacgctggcttgtggttggcacggtaaatgtttcacaaccgaaaatcgtgaaccggtccttaattgtcatgagcacaaccatcaaaaccatatgctcacaacccaccattatcaggttttagttggcaaattaattaattaaccaatcatgattgaccatcatgagctattattaagccatcaataaataatagtgaagcataagttatcccattagcgaactaatgtctctaagcatggctaagcaattatacccaacatctagctgaaccattatataaagctcaactagtcaaattataatagcccaaggtatcaaagaataaagtaatcaagtacaaaagggccataacaaagaataggttaattccacccaatgacattcgaaaatagatgcaatagttgaatagaaacaatagctttaaataggatcaacatgctcaaagggttgtttgggatctgtgtgacttgccttgctggccttgaaaatcctcaaagtcttctcctgcaaaatcggaatctccgggaacgtcggaatctaaagagaaaagaacaaaatcaccaaaacagcacataaacaatcatgaacagtacatgtggatatttttaacatgtagatctcaattttagaaaaatttagagacttgaaccaactaaatccgagctaagatgaattagttatgaattttcaaagattaaatcgatttaaatcatttatatggattttaattgaattatgacgcaataatgaattatttttgaaaaggaaaaaggggtttattgcgtcagcgggctcggctcacggtgaaccgggtgcacggcggtggttcacgagattggacggctgagatctatcctatctacaacggacggccgagatcgattggatccaccgcggctcacggatggacgacgacgatgacgtcagcgacgacgtcaccaccggcggcgaccgaaccacacgagctcgtcggcgaaccacggcacgacagtgcgaacggaaagcacctacgggttgcgggcggcacggcgaactcaccggcgaccaaagcgacggcagacgatgaccggacgacgtcggcgacgagaaagaagcggcggcaaccttcggcttgacgacggcgacggtgctccggcggtcgacagcgacggcgaaggggcggacgagaacggcgacgagatggcgaccacgacggcgacctccacgagcgacggtgacgactggagcgacggcgacgcacggctggagcggcggcggcgacggcggcgctagactgcacggggctagggcgctacaggcggcgagggatgaaggcgagggtggcggcgggtagcggcgggcttgggggtcaatttatagcggctaggaggcggcgacggaggcccacggcgaccggcggcgggatggaaagtctagggttcggaggagagagaccgatccgaatcgacctcgaatcaaacactttccaagcgattttagccggtgattccaaaagagaaaagatagaggagatcgagaagatcatttcccctctattgatttcatcggaaacggaaaggatcggctggattggaatggcggcggcggcgcggcgcggctagggtttcgtcgggaggaagacgacgggcctgacaggtgggccccacctgtcagcgtccggggcgcacgcgcgcggcggctgcgggtggactgggccggcttgggccggggagagagagtgaagggtttgggccgactttcggcccaaagcctaaaggaggattttaaaaacctttttcaatttaaattattcattaaatgaaattccatttattaaaaatacttccttagctcaaataaatcccagaaaaatctaggaattatagaattaagcaaagtatttaataaaattttatctggccccattttatattggaatttatttattaaaattagatcttctcttctaggcactttttaaaataaattctaataattccaatttaacagcaatttataatttggagatttttagggtgtgacaggccctccgccgttatcacgagaagcgcatccgagcacgcatactttcgatcggcgactacgtcctccgacgagttcagacccaagcagggcgaaacaaactctcaccaaaatgggaaggaccctacacgatcacacaagcctcgcggccaggcgcatacaaaatcgcagacgacgacggtcgcgaattagcaaattcatggaacattgaccaactacgtaaattctatgtatgagttaataccattgtacctgtaagcacccttacagtatcaataaagactacttcttggtcccatataacgaccaaagtgttttcacccaacaacccttcactctgacgacgcctagcgttgaaacctgtccttatgtccctttacgccttctcgacaaggcctccgaggaaccgaagggatcttcggctggggacgcccggagccgataaggccttgtcagatccttcagagacgaaagaccatgtaagatctggtcgtgtaagagttctcgccgtgcgtattaaccaaaccgtgtaatcggaaaccaagctttccaacttcacggctgggggctaggatcagagcttattcaaccaagacaggccaggggtgcaagagccttatcacccgaggacatccctccgacgacaaggctgggggctagggagagtgtacaactcaaacgaataactaaggtcgttaactgagaacacgctcttacacacgacacccagagtaagaaacatctgttaaggatagatttctctattcacaaaatattccttacaatttgtacataaatattttgtcgcattacatcttgtcccaagatatctcgttgcagggtacaaatcctaccaggaaggccagcgccagtccattgattggaaaatcttctcggccaacggcgacatcgatctcgcgagatggtctatctccgccggattcctccgagaatgacaaaatccttcgcggagaaattcgaggtccaggcgcgggcggtgatctcgtatgcaagccagcacatgtcctccggcatatcggctcgcccgacgacactcttgcttcaaggcctcatcgatacgcttgccaacgccatcgagttgggcacaggccccgttgagccacaagatgtacccagctgccgatttttcagggtcgccacggacaacccgaagctcccggcacaccctggccatcgaggtgcaacaactcttcaaataggacgagaaccacacctcgcggcctcggagcgtttccacagcttgatctttctttacggccagcattgctctctcgagttccgccacttcaaattttgtattccaatattggatacgatgatcttgggtcgcaagggcatcctcgagatctgccaaatgtaatggcctctaagacaactcggaaaaccccaaaacatcagcaaggatgataggctactcacccaaagcagttgtcgtcacttcgacccccgcatcaagagtttcgtcctcgacatcgtgcgaggcgcgtggttcaaactcgagtactgggatcattgccagtgactcaggctgcccacgctgctggacatcctcgtcatcagtatctctacaatcgacaagagagatttccgagatcaacattgaacaaggatggtaatcatgcacacaaaggcaactagagtttaatggtttacaagtcagaaaaagaagtgaaggaaaaatacaaggggtcctactcttcaaaaagggggaggacagactcccccagatcaccgacttcctccatcacccccttgcgcgtgtcgcttgccgctccctgatccaagatctcacgaagatcgagttcaggacgcgacaacctcacgcaggcgaggacgtgacacgccccggtatagataccgttggacgtctcctccgcgatccgggctgcctgcttggtggggatctctcccatcgctgtcgccagctccgccagggaagaagttaaggagaattcgccggggttctccgggatcgacgacttgacgccacactccgcggccagctggtggaggccggtatacgtgacccgcagagaaccacggatctcggagaggttatccccgagttccgacatgcggtcctcgagccctttgcgctggcgctcattgccggccaccagctccctcatctttgcgaggtcctcgcgagctttggccagctcccgcaccagccggtccgcacgcgcgttagccgccgtgccgtctccgccctcgcttccgagacctcgcggccaatgccgcgagcaccggcctcgagaagacgccccatctcagcttggagctcttcccaggtgaggatggcctctggcggaccacggcctccagcaggatcgctggcagggccactgggcgtcgcctcccggctcccgatcacgggaacgacgtcggtagatgccgtcatgggagaagcgctagaggtccctccagacttggcccgagcagttttcaaccgcgcctccctgtgatcttcagtaggtcaaaatttgactcaaacaagagacgtgagaatctaaaagttccctgacttacttctcgccgattgtcacaaggcgttgacgacgcgcaggaggaggagatgcgtcagaaacctgcaggaccgtcgacacaaagtgagaataaaaccttcctcactacttagcctaatgacaaggtgaaagttaccgaggaagtctctgctttgcgacgatttccgagcacagacgaaaacttcataggcttggttggagccttgccaccgctgccggtggcgacgtcggacgcctcctcgatcaccttctccttcagagaagccgccacctgatgatccgcgagcggtccgatgacgtcagtcaagggaagggcctacgctaagtccgatcacaagctgatttcaaacaaaggaggaaaaagacatttaaataaactcacattgattgcctcatcgcgttctgccgctcccctttcacaaaggggcgcggggatgtcgctcgcggtcgtcgggccgctgatcatcacttgactaacgcgtcgctccacgccgtcgctgctcagagctgtcaagaaagagttaatttttgataagtcgaaagggaacacgagtacaggcatatcaaaatgaatacaagaaggataccccgaggagaaacccgggtcgcgtcatctggcctggaatagttatatgccgggtgggcccaagcctggagcggctggatccgcctatcaacgaagtctgcaacgacttcataccccgataagccccgttctcggagatcatcgatgatgtcgataaacaattggagagagggggtcaaaaggggcttggcggtccaaaccggaatcttgtccggttgctcctcaggaacaacgagggcaggattcgaatccttaatctcaagataaaaaccacctgttccgccatttactgcgagaagaggggcactagaaggggacatagcgcgacttcattccgtcacgaagtcggaacccaacacagccagacaccttattggattccatccaacgcaactcgtaatagaaacgaaacagattgagaaagggctctaccccgatgtaggcctcacaaagatgcacaaaaacgccgaggaaagcaatggagttgggattcaaatgcaaaagtgaaagcccatagaaattcaggactagcagaaggaattcagaggggggaggaagaaatccacagacaatgtaatcttcgatcgcaaccatgcgacctaagaggagctgtggattagtacctcctgcttccctctccgtcttgtcgcggccagggagggcgccctcctcctggagcttcttcagggttgcggtggtggaagtcgacttgccgaggtccatcgccactggaagatcaccggagatagacaaagatcggtgaagctagggttttctgcggtggcgaagaaggcgaggagcactaatgaatagtgtttgctggccgaagtaaccggacctcaaaactcacacacaaaatccctttaaataagcgcacccccgacggtgcgaattccaaggaaacaggagaaatccccgccggagatttctaggtccgttgtgcatggcggtttttggacttcagttcaaaattcattcgtgaccgttgggcttcaaacggtgcgctcgattacacatcatctccttggttctcgcacctggaatgacaacgttctcgacacctggagtctcaaacggtcgcacgagttcatttttgagcagaagtcgggggctactgtcagggttacgggtcaggcataccctctacccctcgatatacgttacatatcgacaaggcctatccacgtgtacacggataaatcctttggcatccaaggaaactcttcgtaaagtcaatagacaaggagagaccttctcggacaagaattgggttacctacgtatcgtgccaagtttggtatattcgagaaagaattgggttacctacgtatcgtgccaggtttggtatattcaagtcctactcggagaacacccaacctacggtataaaagggaccccccggggagggcatagatgatcaaatctcagagccaacacaacccacacagcctacgaagtcagagcctgcaaggagccaagtcgacgagagctagtcgaatcatctcgactacaatcttgtcgaatcccctgagttccatcttttcctttgtaatctgtgttttccaccatataatcccatatcaactggattagggctattacctatcaaggggcctgaaccagtataattctcgtcttttgattgctcgatgtcatactacgtagatccttatatcaacgtaccccaatactctctatatccggtctacgggtatcccccgtcgacaacaattaagaaaaaaaatagaaattcgtaattaaaaaataaggaatattagaaatagagtatagagtccgtatagaaatttaaaactcactaaaattcggaataaacataatgaaattaaaagtagagtttagagtccgcataaaaatacaatttacaaataactaaaattcgagattaagaaaaacatgggaagaagagtttaaagtcaatgtaggaatgcaatttagaagtaaccgaaattggaaattaaaaattaaagaatattaaaagatgagtttagagtgcacatagaaatacaattaaaaataataaaaattcagaaataaaaataaataatattggaagaagagcatagagtctatatagaaataaaatttacagaaaattcagaattaataaaagaaatattaaaagacgagtctatagtccatacaggaatatatataatttacaaataattaaaattttatattaaaaataattaataactaacacgtatataaaatacaatatcaatattacacattagtagtttcgtaaagttattgcaaaatttaaaattatgttattattttaatatatttgaataatatattgagaaaatatatatgctattatatgagagaaaatattattatgctagccgcgcaagctgcgcgggccaccatgctaggtataagatcataaagggcctttcctatccctaaaagctagctaatgaggtgagaggctcccccttatatattaggcccttatgtttccacaaccaatattagactattcaacataaatatataatttgatagatatatgtaatgatttttatgaacgactacgtcaatatatgattgatgtttttgataaacactcccaaatctgaaaaatttatttttgataggcatatttcaatccaacaacatatcctctcaatgactttctcggatttaatgcgtgactcttcattcttccacataagattggctatatgagtatcgagaaatgtaaatattaatgaattgcttgtttacgagaaatgactagtagcatatttaaatagataataaatagaattacttatgcttggtctgtgtgccaagatgaaatatgactataaaaatagatggagggagtatattgttttgataaacgactacattgatatgcattgatacatgattgtcgatgtgatagtgaagtcatggatacataactctacctaacagagtttaaattcttgatcgacatgcacggaaagcaccgcgtgatttgatttgttccaatcttgtttagacaactatgagatagacactatagcatggactagttaccaggactaaactcgctggaaagtacataagatccgcgtcatttgtaaaacgatcaagaaagtgacatcggcaagccggaaaggtcgttgcctgtgttctttttctcccaaatgccgctaatcattcagcgtgatgacgaaggggatgagcaagcgatacacactactctctacacacaggaagcttctccatgcaccacatcgatgtgaaaatgaggctgactttaaagcctactctctctcactctcccaaaataaatacatttctccaagaaaacgataaaactttagtataattaagaaaaatcaaaatatctcttattaattgaaaagtattattagtggatggatagttaagaagtataaagcgaaaaaacttatcgatttatgaatcaaattaggcaaaatggtatgaatctaatttatcttgaaataaattttaaactctagaaatcaactttttttttaacggagggagtgaacggatttggtcattgacaattgggaagaaaattctggttaacatgacaactggatttatggtgtagggatagattgtctaccacccaatttgtttaaatccacaaatgagaattggtatgtggccttatcgctttttatttattttatgctgacggtactgtcatgtcatgtcatgtgtacatgtgcgtcacttcaggttaaaacctctccggagctagtcttggtgagggtgaagcatatctggttttgtggtttgggagataatttataccgtcactaaaaggggataattcagtttttatttattttatctaccagctgtaaacctccgtgtttccactttcgaccgttgtaagacatgtgcaggttacaaagataattaatgtctcctttgtagcaaggataaatgaaggatgttttaggatttgaattctatatatataagaaaatttcgtaagtgcccattcgttttgaagaaagaattggacataattgaatcatatgaaattgtttagtaattctgcagtggcggagccaaaaaatcaaagaagagtagggctaagatatagctcaactaatggagcattcattttctataaaatttagatggtgaattaacaaaaaattaactatgttcttggaggcaggcctagggctcaaaccctagatgccctaggcctgcctccgccccttactaatactatatacgttttaaaagataataattatcagggtatatgaaaaaagtgattgttcataaataatatagttgatagacactatatttttttttctccaaatcatagttgatgacttgactgataaaataaactaactatgattaatggtcaattctatgagcccactatatcagaactgaaccatgtagcatcttgttgatattttgcaaacagcaacgttttggcagttgtgacttgtgaggagctgatcttcatgtttggcagctgtaatgaaagagtagtagcttagcaacggtggtttcgaagcatttcgctctactaaaattttctcacgtcatctctgaacacgatgcaaaggctgaaactttctaaattgtgcttataataacaggagtagtcatcaatccgtgtattgcacgctacaattactccctctgtcctaattataacaactaggagttcaaattttattccaaatataacaataatccaatatttatgaaaaaaaataacttttaccgttgaactatccatacaacctagcctaaactagtctggacatatatttcatccaccccaataagacaactgagtatttttacccatcttcttcatacatgtgctggaggttaaaaattgttatatttcaactccaagggatagtatatatatatactaacatttatgatttttttcagatattatgttttactttcagatattatattttaggtcaaagggagtatataccggaattctgaaatttagattattgaattgaaccgttctatacacattttacatgattgaataattattaatattttcatttttgtataaattaagagtacgcatattttcccttacagaatctacagtccaacaatagcgtgacaaatttgcacatgccacattcaagcataccgtttgaagccgtgtatagactacagtagcgttgttggctttctagtttggtgtccgaatttcatccaacctttttgcatgcgtgcggacaaattgtaatgagtgacccatatctctactattataaaaattgaaggtgtttttgtcggtaatttgggacgtcatccctgtatgagtcggtttttaagtccgttcgcttttagaaatatatatccgtatttgagtcgactttaagtttattcgcttttgcaaatacagaaggagtcgtacgagaaatccctttaaaagaactcgcatgctaacttgagatgatcagacttctaaccgcagctcatgattttcaaaaagaaaatatatccaagcgaattgccataatgaattttacctaaacaatataacagtaataaggttaaaatagttttcacctatcgcaatgcacgggcattttttctgttcttactagcatatatagtcacgcgtttgcgtgactatgataacctccctctctgtttaatatataataataattagcaatatacaggtgtattcggatatgtttgttgaacatatttccactgtagctataacatcatcagattaactttttcttttgtaattaacaatattaccatgttatctaataatttatcatatgttgacacaacttggtacacctgatcattctttgtcataaattacactttcttatttttatgctgaatttggattaagatttattttttaaagttggtttggcggtagcattacatcattttggttcattttgtttgaaaaggacatatcgtgtagtaagaaataattacctattgactgataggacaatagaacacatggggctcccaaaactttaaagtactcagctatggtacgtgtgaaatattagaccacccatggaatgttaattttgtactaaggtctttctagtgagctcctaactccacccccctcccctccggccgttttccgcgcgcacacttttcaaactgttaaacggtgtgtttttttaaaaaaattctatacaaaagttgttttaaaaatcatattaataatttttttaaaataattagtaaacacttaattaatcataaaaaaatgcatcgctccattttacgtgcggaggaggtgagttcccagcctcacctcccaaacacagcctaagtttttctgtaaatggcacattctacctccagcccatttagggcagtcattaggacctccccggcccattacgcctatttgatggcttaagcagggaaaagtcactgaccgagttccgcttgctaatatgcgctgctccatcggagagggagatctcgcctcgctaataactctttcctccattgttgttctcaaaatcctgggagacgggattgtatgtatccaggcggcgggctctacctctcgataacaggctcagccagacagccaccgagccacgttgcttatgaggggaaagtagcgacgggaaggtggtgaaatcacggggagtgtggagtcagaaagaggaggggcagtcgcggcctcccagggagggattgggaggcgctgcagttgaggaggagcagaacagcgaggtcgagggaaggcagcgcagtgccgcatcggcagaggagcgcgtggaaggcgagaaggacgagggggaggcagctgcggctggtatgacgagaggaacggttgctgaaccggtgattggtggtgggctgatggctggccggcaagcgtgtctgctcctcggctcctcccggcctgcgggtctcctccgtacgtatccgctcttctcttcttcaaccgttgctggtaccttctatccttccctttcgtcatccccaccggaatgtcggcgacggagtggcccggagaggaggcatcggtgtggttctcggctattgctgcccatcatcgcctccgatccttggattggacgggaaggtggcggcggcctcgatggatggcgtcgtggtggtgtggatggcacaagtctaggctgcagcgcgatcgctaatagcgcgcgccgcgcgcgtgcctcctcccacgttttttttttcattttctttacctattttttcgttttttcccacttttttctgattattttttaatctttagcatgtttcgagtttgaaagtttttaaattttgagttgaaaattttcaaatatgaacttgaaagttttcaaatctcaagttgaaagttttcaaattaatctcgatttgaaagttttcagatttttcaaatctgtacttgaatgttttcgaatctcgaattgaaaattttcaaatctcgagttgaaagttttcaaaattttcaaatctggacttgaaaattttcgaatatcaagttgaaagtttttgaatctatgtcgaaagttttcaaatcacgagttgaaagttttaaatccgagttgaaagttttaaaattttgtctttaaaatttaaatattaaatcaaaagatttcaaatttgacttaaaaattttcatcaaaaaaactcctgaaagaagaaaaaaaaatcttgagaatcttccctaattagtcattagtgttaagtgttaactaatactatagagtagttatagtattagtagttatagggaagagcttgttgctggcgcgcacgcgccagctagcagcagcccccaggctgcaacgcgttgtgtaaattaagtggtttttatttttccttttcttttctctcttcttccgagagcctcttccaaagtcttcactctgtatctctttcccacgtatgtggagctggaaagatcagaacaccatgttttggggtggagctagaacgagatggaggggatgccacttgtttaatttactctgctttatatcaagtttaagctaatgcaagtgtctaaatttgttttgagggttgtggacacatagtgaaaatagatcaagtatagctataattttttcttgaccgggttcctgggcaaccctcctcaatactctagctccgctcctggttttattgttttctgctgatccgatccaatggctatatccctccttttttttttctccatctgatggtccagatgattttgcttacgtggattaatctaagttttaggaattacttttcacttatagagattgccaaaatttgctataggatatttaaaatgtgtgtaatttactaataattatcgtaaaaaacgtattgcagctatataacactattacataacatcaaaaagaggttggcactattggcacctatagtactttttccgcccacgcacccactcacgggtgagcaagcgcaaaaaactgccacctttctcttcaaataggtcttagtttttaaatagaaccaatacctattttccctgtcgagaaaggtgtcagttccatataaaatacgacacctttcacatatgtcccatcggagttattcgttgcggggcgcacaataaaactgacacctttgtggttaccagagaaagataccggttcttaactagaaccgacacctttgagtcttccacctagctagtagctgttggagggcccacacttaaaaaccagcacccaaaactttgccagagataggtgtcggttcttaactagaaaaagtcaaaattatttagtatatagcatttccacatccctcgagttgatcgagcaaagaacagagaagcacctcttgttcttacttaattttagaagttccagagaaaaacactatcaaacttaatttaaaaatattccaaactaaacatatccaacgctactaaaagttggtaacaccaaaatatgcaaaattttgatagtgccaaatattggtaaggttgattttggcaataaagtgaaaaagtccttaggttgaaaacataaaagtcatatagataattttctttgataagtacttttacaatattacaattttttaagatattatcgttattttctaatgggaaaatagtgttccaagttacataccaaaaccaaataaaatcaatagatcattcattaagtgtttagctcatcaattagtgatacatggtggtaattaatagcatataaagtgtttagctcatcaagtgatacatgtttgtatgttgtttcacttttttttacttctatttataatcccatgacaaattgaatttatatttggagtaccatttccactaattcaaggcgcattgcaagcatcgaagtgtatctcatcataaatttgacctatacaagttgactgtgaatagagcgtaaactatttgcaatcatatttgttgtttttttttcttctatacgctgttaaatatcagttttacgccgccaatacctgcataaatttgaaaaatataaaacatccaacaaagtggtagggtgcaattctaacaatttccactagtgttgatgtatatttggatgcaagtgacaaactagcaaagttaagacaaaatatacataaaagaggaggagaattacttccatagagtcttgggcccacaaactcatcgaaacacatgcaattcggcccaatcgacacaccactggactagggtcccacctgtcagagcccaggagaaagaaatgggccagggaagctaactaggggtcagccgaggtcggtagtaactgccttccaatgacggttactactggtattggcgccccaaacgtattcatgctataaaaggacctatcctccttcacttcaacacacaccaagttgagctaaattgcaagatgctctttgtatcatttatgtatacttagaatagggagagaggaagggagaaagagtaggaggaattccggagttgttggtactttcctctttacttttcataccttgtcaattactttgttttaattgatattatcttatcgagtaattgagatttactttgtgatgtatatttcttagttagttcctattatcatattggaatattgttcactagaaatagtgtttactttaatgtttgatggcactagagtagtatttaatagtatagacgtggtgtctatattgttgaatacctgtatttgttgtgtatccacagttcattagaggttcgtgtagagctggtgacagctatcgagatcaccgtagtcctctctgtccgggtacattatcagttgtcactctcagaaaacaaatttatatgttctctagattatctttctaaaaaagggtcaagcaaagaaatgcaacgaccttgaacttattattcttacaagagtccaataaaatattttgtataaatggtattggctcacattggtcccgttacatttgaatgaaaataatagtataaagtaatattgcacaatcgtatttatttttttccgaaactatttacgaagtatctgaaacaaagtcttggattatggtgcgaaccactattggaatcctcaccgagtgtgtgacaccatctagccatgtcaagcttccaaacgtgtagccagactgtactctctgccttgctgtgaatgtcaccttgaatgttgcatttctactaccacctttggtgaatgtgataattgaaggttcaacagatatcctcacaccagctggagcctcaatcgatgccttataagttccttcttcccctccgacgttggttacagtgcgccaaaccgtaacagagtccttaaggtctggtacgacgatggacggaaggttgagctgatagagctgacccacataggactcacagtcatccttagggccaagagtgagggtgcagttgaaaaacttagtgtattctttcgggtcaatgtcatagacaagcccagggtcaatggacttgtctgggtcgatctggccaccaccaaagtcgaaggggtcggcgatcttcctaggtgctccctcagcttggattggcatgccaaaacgatcggtcaccgatgctgcaatagtagagagatatatactaatagtttgttagtcctaaattacccatataaggcatatacactgaacttgtagtgtggcatgagtacatgcctgtggtgacaatggcagacttgatcatggccggcgaccagtccgggtgaactgacttgagcagcgccgccaccgccgagacgtgcgggcatgccatggacgtcccagacatgaatttgtatgagtcgcccacagcagccaggatgctgactccaggtgcagatatgtcaggctgttgaacacagaatcggatatcagaaggtaatttcacacataggaatcaagaggaacgccgttaattatctcatggttgggatattcatgtcaagatcaaggtcgttgttgtcaccttgaggatggcaggaaactcattgctcgggcctctcgacgagaacatggcgatcctcggtgcgagtaccccattcccaaccacgctcaccacccgagatatcttcacgacagatttcctgaaagaaatagtatatgaagaacatttgggcgttttcagacgagcacaaccaggttctgattatattactttgttccaatgtagctggtcaccaaagagctcgaactctcaccttgtgcttttcgcgtaggaggcgattctgcttgcgatttcgtagtcgaccagccggcagatacaggtggcagaagtcttccaagccatccaagacgttggcgctgtactgcgcgtagatgagacccttcgcgcgtctcttcacgacggcggctagtgtggcgatgaacgcgttgtttggtgacgagttcgctgcctccaacggcgccgagcacaggacgatcttgccggtgatgttgaccgatgccagtgacaactcgtcgcatctgtgtcaatggcatattggcattggtctgcgtcactcattcaggatttatttatattttaataggtgcagaaatattcgtagatataatgtgttgactgatgcgttgttttggcaatgatcatttcgttccgttaccttttcccatcgacgagcatatgaaagttgctgctgttcatcgttgaattgtagttaagagattgtccctgaatttaaagatcatattaaaaagaaatcacttttaacctgtaacaacgccggtgttttttgaaagaaataaaagcaaacagaaaaagaaaaggtcggtggtgcgtaccacaagcttctctttgttcccgagcgatatcacggttggaaacgagcgatcgatggtgctagcggccaccgtgatgacccacggcacggcgttcgacacggactgtggcacggggccctcgttcccgccggcgaacaccacggtgatccccctcgccacggcgtgcagcgtcccggcgacctcaccgtaccctcccagcgacagcgacagcacgtccacgccgtcgtttatggcgtcgtcgatggccgcgaggacggacgcgtcgccacacgtggagttgctgtcaccccagcaagccttgtagaccgccagcctcgcccgcggcgcacctccgcgggccatgcccgcggccaggccgctctgccggtggctcacgttccacacctgcccgccgacgatcgtcgaggcagtgtgcgtgccgtgtccgctaagatcccttggtgacatgtactcacctttgagaaagtcgtccgggatgtcgccggagtaccagcgcgcaccgatgatcttccggttgcaactcgtggtgttgaactccgcgccagtctggcacttccccttccatcgtgctggcacagggccatagccgttatcatcaaagcttcgtgatgtaggccatatccctgtaacacggttcatcccggctaaattactaaattttttaatatatagcatgctaattcagcgagagtagtactagcatgtaatgcatttttcaacctgaatcgatgacgccaacaatgacatcttcaccatagtttgccttcttcaggagatttgattgttcatagtaattaagtccaagaaaatcccagctccgggtcgtgtgtgctttatgataagtgttaggttttacactgacaactccaggtaattctgcaccggaaactcattagttccttaataatgatcatgcaagaggtaatacgacatgctcatgccattataaaggatcgatgattacttgcaagttcttcagcttgggattcggtgagcattgcagcgaatccagagaatccgtgcttgtagctgtagactatagatttcatggcttcatccttactgttccatcgaaaacaattgacaaaattaacccaagttccttttcatgtcaagatgcagaatttacaacttgaactactaatacctcccaaaaaccgaagtaagagcatcatggtgcgatgcggtgaccacagatggatcgtcatgcttcttctcccccatgtaaacaatgtagagctgaaaattcaatgaaaaaatgttcccaagaataatgtcagtagtactcttatgaaacaaaataggaaatcatgtttcatatgggagaggaaaccggcttactctgctggacgcatcggcgaaaatggggagtaccactaccagtacaagaatcaagtgcagagtaggaagaaaaggtgatctcgagtccatgtttgatttcgaggagtatgttcttatggtttggtgttgtgatcttatgctgtggcatgcaggtataaatagcagatagcatccaacattaatcacgcgggggatatgcaggaactgcgttaaaaaaagaaaatcctcgtgtttgcgtgttgatttgttctttcaggtcacaagtaacgacagaaagagactaattaataaatcaaatccacacttgtatggtaagcattgtggtttgatttgttcgtcatcctcaaagaacagtgatatgataatactgtttcacatgcaaagaccagatcaacattgtgtggtgatgaaatgaatttattaattagtagagttgggtagagctctaactcctaaatttaacttcaggagttgggtttggactggagttgtggagttgcataaacccagctgaacttctctagtttattttgtgagagagcttcacacagctccactcctattttaggtggaactaaaactgtttggctgagctccagttctaggagaggtggagctggaattggaattgtactaaacagaccttaagtcatccatggcttggatgaagcttctgctgcagcatggctgcgaaaaagcgggctgtattatttaagcattatgacttattcttgtcgccgaggttaaacatagatgcatggagaatttacctactcttgataaggccctgcttagttcgcacgtaaaacttttactctgtcacatcgaatgtttggacacatgtatggagtattaaatatagaaaaaaactaattacacagattgcgtgtaaattacgagacgaaacttttaagcctaattgctccattatttgacaatgtggtgctgtaataaatatttgttaatgacgaattaattaggcttaatgtattcatctcgtagtttataggtggattctgtaatttgttttttcattagtctacgtttaatactttaaatgtatgcccatatatccaatgtgacatgccaaaacttttcacctatatatagaactaaacatgacctaaacctttcaaaactgtgagctgccgtatgggcagagagaaaaagaagtgaaccgtacccagggaaatttcttctgctccataatcccagagtcaaacttccagaactcacacgcccaccaaacctactagaattatctctagctcaattagcatcatcacaaaaatccttttatgcaatatgcaatcaaatttggaatttacatactgtaatttgtcgataaattcaattttctcacaagctccatacattttttctatcggcacctacggatggaattcccgaatactcggagagtacattatactagtgcagtggctagcacacacattcataaccttatcatcacatccacatataatacacatataaatagatgacatggttcatataacctagcgagggcataagtcataaaatatagttaggtggctaatatttcaaggcaacagtgaagaaaggcttagtggctaaggtcggcttcaccctttagaaggtcattaatgcctaattttaacagtgttatcccattaactggtagaactggtattttttttatatctactccctccattccataatataacgcacaactattttttaaagttatttcataatataaggcgcatatgcatgcatgtcattaattagtacatcttttccattaaaatattattatttaaatcatccatcatcaagatctctaattttattgggtgcatgtattctatttattagggtaatccaaactataaagtgataataattatttattgatcttcggattaagggtggttgtaccttatattttgtaatggagggagtatacatatatatatatatatatatatttaaaaataagtgagacataaacacttaggtaagtagtggagatacaagtgacacatgaacatttagataagtagtggatataattttttagtgtattcatgatgtattagttttatttttgtggtaaagttgaagtttcatccatgaaataggcgctcagatttcaaaacaattactataattgacaataggccaattaattagaaggagggctagcttgatggtagaaataaaatatatttattaatgataatagttttttcagaatttgcaagcaaagaagacataaaaacacgttactgtttacactctattctcaaaaaaatactattaacacactcagtttcttagagagagaatctactcagtaccactgagtttggcacagttcaacaatatgccacagactttgtccacatccataatataccattgactttcccttaacctctacgatttaccatcatggtcacagactgttagtttgcattgaggaaaagacaagtatgcccttatgaaggtgaagaccagtagcattgagcaagatgcattgcaaaatttgacagaaagatgcataaatccccatgtccaagtttagcataaccaagttcaatcttacaagagctaaaacaacaagttaagtggcatatatgttaatggagggagcaacaatggcaatcgacaggttgggagcggctgggggttgcattgacgacggcaacaactctccagcaggggcgccgtgtccccttgattgtgacggcggagctcaagacaacggcagcaccagcagtagctctccaacaggggtgtcgtctcctatctgttgcgacgacagcgttgtccacagggattgattgaatcctatgtttagggtaactttccttcagccttataatttgagacattagtttagcaaaggcatggttttgtgtcgatagaaaacacacatcggaccatctagtagatgcgtcaatcaaaaccataaaatatatgaacggtctagatcttggcataataggaccacacaaatatccccttgaatgcgttcaaggactttaaatggttcggctctaattttgagataagagggtctcaaaatcagtttcccacatgcagtgcatacaaaatcagagaatttgagaaatttatcagtgatcaaatgatgaccagtagtgttgccaataaattttctcatcatcccgatgccggggtgccgaagtcgatcatgccgagtgtggaatgcatcaacattttgaaaaattacttcatacacaacatgtgcaacgggcttaatgtatgtatagtaaaatcctgatgtgagagatggacttttctcgcaaatgcgtttgccatatctgttttgtttagttaagagaaggaattcttctcgattatgcatatgggtttcaatgtggaacctattttgacggatatctctataacttagtagggtacgggttgaatcgggatataataaagcatcatcgattgtaatttgtgtacccattgggagtgtaatagtttctcgtcctgagccaactattacagtatcgtgtccagcgatagtcaaaactttgccttatcttcttttgagagttatgaaagtatttgatctccctaagtatagagtttgtggtaccattgtccataagacataattcctttccaatcggagcaatatccttagacatctagaatgaaagaagaattgcttagttaagaattttttatccaatattattaaatacatgcaataattaaaacattaaatacattgtatgacgtttacataggttaatagtacatactctaatgactagcaagtcttacaaccttacaatataagggagtttgtacttatcatcttattacaaccaccattgtttaacaaactataggatattaatatattgtttcaaacacactgagattaaagcagtttcacctccaagtgggatgcactatgattacagtaaatcaccaagtgggtccgttgagtagtactcgatgagcatgtcgtccattgcaggcagtggagcgatgtcctctgggagaagattgagattgttctctggttcaacaggagcctagtgagaacttccaaccttaggtctttcttcatttataagattgaagtgagcttcaaatcttggttcctcagaagactttttctccttgagggatttctgatataggagaacaagatgttttgggatgcggtaatctttagcgacatgatagtcagatccacacatgttgcaatgcttgttgttgttgccatgaggttgtggtgccttaccctttccttttcctttctttcgaccattggatttgcgcatgttgttgcgtttgcattttccagtcaaattcttaggattattcgaagaatttcctttaaatcctttcttgttctcagcatcatttttgacattgaagtgcacctcagacagtggagcagagcccggggggcgctgttgggcttctggaaattgttagtgcgatactgttggtttagtatcttgtccggaagcatagttgatagagttttctctatcttctttgcttccgttggctctttttcgcaaaacttcaacttggagcaaatgttatgaacaacatgattgtattctaccatagttttgaaatactgtaggcgtaaatgaatccattcataattagcctcagcccaaatgagttccttttgctgattataatgctctttgagagctttccataagttgagtgggctcgtcttcaacatgtattccttcttgagatctttatgtatatagagcctcagaaggaaaagggcagtgtttttcttcctattctcgattggtggatccccatcgttgggttcctcaattgtattagaaatcccacgataagcaaagtttattttgatatcaaaagcccaaattgggtagttagtcccatcaagggcgagttcatcgaactctttagttgccatgtccctacaatcacgattaacattattaatttacagagttaaattaataaaacatgatattgaagttgtaatctcaatgcaaaatgtaagacttcatattttgtaatgtttcaaaaagatgtaggtaatagaactaaaaatttgagttaaaattcgaaattaggtggcacaatatggataatcaccaagtaattaagctgtggagtagatctcttaatagtgggcaagatatacatgctgcctaaaacatggtctctaggcaaatatattctggtgaatataccgtagccaatacttaggactccactactgtcgcgtcccaaaacgaccctaaaatacatcctttaaattatgcctagaataattaaaatccttgtgaaagcctccaaaaattaaaaagtgcaaagttaaaagtcaattaaggctaggaggatttttgtatatttcctaaaagcctaaaatgtgtaaataaattttagtggaattttcagagcacaaataataattattaagaaataaacaaagttaaaaaggttttataaaaagaaaaaaccctaaaacccctccttccctctaatgggccggctcggcccatctccctccccccctctctcctctctcccccgcggcccattcggcctcctctccgcgcgcgcgccgctgacgggcgggcctgcccgccacccacgctgacgggtggggcccacccataatccccttgctcccgccgctcccaccacctcgactgcgcctagcgccgccgccgccgcgaatcccgccgcctcccgtcgtccccgcgtgaaattaataggggggaattactccccgtgatcccctctcccttttcccccattttttccctctctctctcgcattcaaacggccggatttgctcccgcaaatctcgccggcgccattgatggcggccggacctcccgcgcctattccatccccgccggccatcctctcccccttccaaccccatttaaaccctccccgcacctccttcgcccgtttccaccctttgccgcgccttctcctcgccggaattgagctcgcgccgtcgctctctctctcctccatcgccgacgaccttcggccggccctctccgctcgccgggactgcctcccgccccggcgtcgcctcctccggcttcgccgcaccaccgtcgaccccatccacccctcatcgagctcgccgaccgccggagcgccgccgtccccgttcacccgagccgcgtcgccgccttcctccgctccggccgcctttttcgtcctcgccgtcgacctagggtgagtcgtggaccgccgcctcgtttccccctttccctcccctttttcgggcgccgctccgccatgcctatggccgccgccggcgaccataggggcgcgggcgcgccggcgaccataggggcgcgggcgcgccggcgaccataggggcgcgggcgcgccgcctcccgccggccgcgccgacgtggccgccttcgggcgcgccgagcggctgccgcgtggggcccggccgtcagccgcccgcgccctcgggtgcggctgacgcgtggggcccacggtgccggccggtgtgagcctgggtgtacccggtccaccgtggaccgtgaggctgccgcgtgggccccactcccgtggacccggtccgcgcgccccctccccccgactgacgcaataaaccctttttaaattaaaatttaaatgaacaaattcgtaaatattcatttaaagagcatatgaactcggaattggaccgttcaagtctctaatttttccttaagaagtcaagaacccatttttgtgctttgttcctgcttgttatgtggagttcattagagtaaaaccccttttcttttctgttggtcgtgtagacgctgcagcttcggaagatccgctcttcgtggaggttgaagccgacgtttgggaaagcgagcaaggcaagtcacatcatctttgaacatattggatcccactttgtgaaattattttgatttaaattattgcattatcgctttacttaaattcccgcgtaatcactgttttatttagccatgcctatttacctttgttatgaccgtattattgctattgttattattacctttttcaccctagaataaacaaaaccccaactagtgggcactctactcatggttccactagtatgaatttaggtagatgcttcgctgattaataagacaacattaggtggttttataactttagactttgggaatattcatatcacttggacattatggaatggttggattattgtggaattggatgcacacctccccatctattcaaaaccctcaaaatggttttaggctgggctcggggtgcatggtcttgatagtagcacctcggccaaataaggaccggtcttcgggactctgttgcaaagcactaccgtacttccacatgtctagtgggtaaggcttagtttgtggctcagtctggttataaacaaaagtacaaggatggagatggacgaagtcgggggtcgatggacatctctaggagaaatgaaggctacacgagctgcggcccggtagtcgagatgtcatggcacagggctggtgtcctgctgctaggggctcagtgctgcctacctgtcctggaggttccggccgtaggtggggttgggtcggtactcttgtctatggctaggatgggttggaaactatgtcatgtcttctgtccatatgccgtggtggtatgtggcacgtggttgcacgtgaggaagacgtgtcttgtgggtaaagatgtacacctctgatcagagtaaaacctattcgaatagccgcgccctcggttatgggcaagcctagcaatgtaccaaagttagagtttttaattcttaaaacctgcttaacaactaaaatgtggaatggttggcctgggttggcttgggacgggctgggacccagggtcgggttgccagttcggtctgaatcatcgtaggccttgggttaaggcaggttcgtgtgggttcacggccttgttttataatattaaatagttctaggatcgtgttttaaatttagctttgagcaactaagtgtcttttaaatgctgtttactgcaaaacctaacccctatactataacaccattgtactcctttgcatttatgttgcacttgtgggtgtgtcttgttgagtacggtggttgtactcagtcttgctcaatttttcccaaacccagaagaggagctcctggatgatgaaggctttggtgtttagctcgtgcctgccgtcaagcgcctgtggtcgtcgccctagtcttccgctgtttgccgttgtctttctgtatgctgggccttcgttgcccatgtaataattaactatttacgcttccgcttgattaaactctgaattgtatcaacttttggtgtaccttgcctcttgggacaaggaataatatacgcacgtaaggaacgccctttgggttatttccggtcgtgacaactaccttgttcttttccaaatttcaaataatctcatttttcaaaacatattctcggaaataacacaagtgggtaatcatcgtaagatgcagacctctttgtgatgggcaagatactcgttgcctaggttatgaccattgtggccaatttgtagaactccatctgggtaatcatcataaaatgtaaaccactcaatgatgggcgagatactcgctgcctaggttatggttgttgtgacaatattatatgtctccatctacatgtagttaaaatccaagtcaaaatgtgcagtcaaacatgcattaaatcctccattaatcatgttgtacataattaagagaatttgctaaattaaagtacaaaatttaaagaattttgtaaattaatgaagcgaggaagtagagcgtatcttcaaataatatgcaaaaggcattttattaagacaactaataaatttagtaaagcagggtatttaaataaatactatgttaattaacatataacatcaacggtctacaagaccattacatgacaatttgtacaactgatgaattgcttccactaaattatgtaaaacacagggactcgtaagtaaaatactgctcaaataaaaattaaaaactaaaaaaataaaaggtaattgggtggtgtgactcctcctcgaacgacggaggacgtggcgcagacggcgagcacggtcatggcgaggaagaccaagaacggcgtcaatcaaggaatcgaaggtaggcatctcgtacctttgctattgattcccttcttctctttcaccttcgcaatctccttcgcgagagcgaaaatgttgacaacgtgttgagagtgaatagaatcggaagtgcgagagagattgattgagagaaaaagaatgatttaattgatcactgtggttacaatatatacgggggagagatgctgcaactctggatgcgatggtttgggaaccattgcgcccattgccaggagcgccgcaagggcaagaagacgtggggcacgacgcaaccgtcgtgtccctcagttggttgccgatccatccatatatatggatgagatcatatatcctgtttcacaacagaacatatggatttaaagttggcccacaccttttaatagaaagtattttacgatctacagtcatgatagatcatctatttggaagtgtcatttctaaaaggaaaaagtacgaattaccccaccgaactatcacggtcggccgaattttcctcctgaacccgaaaagcatacatcactcaccctgaacttttaatactagacgaattacccccctcgacccaatccagagcagttttgtcctacgtagcgaatacgtggcagcctagccagcattttctttttttaaatatggtggagcccacctatcattttctcccatctcctcattttcctctttccctcttcccctctctctctctctctccgtcaggcgcggcagcgcgggcggtcggcgcgcactgcggcacgcgagggcgggcggtgggcggtggcgtgggacattggcggagaagcgaggcggaggtggaagcagagaggaggcggtcgccagagcttgttagcgagtggtggtaggcgcgacgaagagggggaaccggtctgtgggctccaaacagcggcgggcggcgaggagggggcgtggctgggagggcgaggtaagcacggcggcaggcgcggctgggtgcacgaggcgagcggggcggtcggtcgagagggtgttgcggcaagcgtggcggcaggcgcgactgggtgcatgaggcgagcgcggctgtgattccggcgagccacggggaacgtcgcgagctcccgccgtggcagcggcagcctccgcgcaagaaatggcatcctcctgcctcaccggtatccctcggtgccccgggacgagcaggtcggtctttgcaggaaggcggttgagtactttgaggggatgtgcggccggccggatgccatgttcgacgagttcaggagactccaggtatatatgtatggtgttcttccgatttcctcgtcgtcgtgatgccgcaaggttcgtccacggagggtgagtcagggcctaagatcaggctgaaaggcgtagtcgatggacaacatgtcaatatacctgtactacccctgaatgttttcttgataatgcatgtgttgctgtttcctcccaagtttggctaactactagattgctcatactgattccgtaattgaatacgtgttttagtgatcctccatttccttttggagaaaatcccttgtatacggtatacctctgaaattttacctaatcccttctatgcccctaaattttgcttacttccttatatacccctaaaatttgattttgatcccttgcatacccctcccgtcagttgaccgtttattttctataaaaatgaccattttaccattggctgaacaaataaatttatgaattacattattaaaaatataaaagcttctcgcatgagactattatagttatgagttcgtcgtgcgatgcattatttatcccaaaaaatatttttagataataaaacaaaaaatacatatttattttttaaaaagagtcataaaaatgagtagcattcatataaagataggactaccaatgttcacaatatttttttatgagtgctctcgataaaaaaaatcaattgccctattaaaatttcaaataaaaattttgatttattacatttattttatttccaaaatttatgtcaattttttcactaattatttagtctcattagttttataaaatgcacatattgtgcactcaaacaaaattttcaattgtttttgaagcttatatttaaacctaaagcatcaagggcaaaaaaaagacatttgcaaccaaacgtaacagtgaaatgatagaaaatataacggttggggcatggaagggatcaagttaaaattttaggggtatagaaaggatcgggtaaattttaggtgtacgaaagagatcgagtgagttttcagggtacacaaggaatttactcttctttttgcatcttacaattaggtccgcttcttcataatttctgcatcttacaagctccggccatcgctcctctccgcctcgcttctccgccgacgtcccacgctgccgcccactgtgcgcaccgaccgcccgcgtggccgcgcctgacgacgcgttgccgcccaccgccgccctcgcgtgccgaccgcccacacggccgcgccagacgtcgcgagagaaagaggaagaggggaagaggaaaaaggaggagatgggagagaatgacaggtgggccccaccatgtttaaaaaaagaaaatgttgactgggttgccacgcgtatgccacataggacaaaactgctctggatttggtcgaggggggtaattcatccggtattgaaagttcaaggtaaataatgtctgatttccgggttcaggaggaaattcggccgaccgtgatagttcggggggtaattcgtactttttcttttctaaaattatcacgatcgaatagattagatgtatgtactcggaaagataagattggtagcccgtgccatgatgtgtagaacatactccctccataaaaaaaactcaacttctagagtttgaattttgtcaaaaaaaccaacttctgtcatcctaactactctaaacacgtaaaacaagaagttttatcccttcaataccctttaactacctatcactttttcaacttttttcaataattaagggcattttagtcattctccatctccactacttctatcttgggatgctaagaatggtttttttttgactgagggggtatggattatcgtttaatgcaaaagattttacgatctatagtaatgataaatcatccatttgatttgaaaaatctatcttattaacagaagagctacttaaaaatacctaactagtatagtacaggtataacttgtaggatcgtaaagaaccttgtccaccccaaaagctagctaataagatgagagtctcccccacttatatattaggtcccttgcacccacggtcaatcagatcttccacacactttgtccctcgggccagagatgttaaaataactaggctttgataccaattatagaatcataaatggcctttctcacctccaaaagctagccggtgaggtgggagactccctcacttatatattagtcctcttgcctttccataaccaatgtcagactattcaacagtaatatataatttgatagatatatgtaatgatatttatgaaccactacgtcaatatatgattgatgtttttgataaatatatcgttttgataaacgactactcgctccgtccaaaaaaaggcaaaccctgggtttccgtgctaacgtttgactgtccgtcttatatgaaatttttttataattagtattttcattattggtagatgataaaacatgattaatactttatgtgtgacttatctttttaatctttttcataatttttttaaataagacggacggtcaaacgttgaacacggaaatcagggtttgtttttttttttggacggagagagtacatcgatatgcattgatatatgattgtcgatgtgatagtgaagttatgggtacataactctacctaacagagtttaaattcttgatcgacatgcacggaaagcaccgcgtgatttgatttgttccaatcttgtttagacaactatgagatagacactatagcatggactagttaccaggactaaactcgctggaaagtacataagatccgcgtcatttgtaaaacgatcaagaaagtgacatcggcaagccggaaaggtcgttgcctgtgttctttttctcccaaatgccgctaatcattcagcgtgatgacgaaggggatgagcaagcgatacacactactctctacacacaggaagcttctccatgcaccacatcgatgtgaaaatgaggctgactttaaagcctactctctctcactctcccaaaataaatatatttctccaagaatacgagaaaacttcagtataattaaaaaaaataaaaatacctcttatctatctatcttctattatctatctatctatttctattatatactaaaagtccattaaacttcctagaaacgctctcaagccgccacatagcatccctacaaacgctctcaggtcgccacatggcgctatagaaaatcaaaacatctagccatcggtttttgttaaatctgatgggtccattgttttccaacattagatccatattgaaaatttaccatttattttttccacaatatagaatgtacatcgctgcacgtatgtacgtccgtacatagcagcccctcccaaaaataggtacgtactttttttctttttttctttcccaaactaataatccaattccatattatctatacttttatgctttgagctataaaaatgggagtagctatacagctggcgccacaatttggcccaaaaatgtggcgattcctggaccacacaaattactgaggccacaaacaaaacgggcgtgcaacaaatcaaaccatacccgttacagcaaaaaagcccataaaacaagcgccacatttaggcccaaaaatgtggcgaatcctggacaacaaaaatcactcgggccttcaaccaaaacaggcgcgcaaaataacatcacaacaaacccgtttaaaaaaaagcccacaatgccaagcatacaaaaaaagcccatatggcttgaaactaaaacaagatgagcccaaaactataaataacaaaaaaagagcccatgagtgacagccagaaaaaaaggttcatcttcagctacaagaaaggaaaaagacatgtcaagtgaaaagcaacagcaattaagcacttcagaaaaagatcagagcaaaccacgtgacaagtgctcatctagctcgttctctccccccaaccatggagatcgctgagaaatctagacaaaaggaattggaatctgctcaagaaaaaaacaccatgggaaatcctacaatctcaacaaccaaggatttctcatcagaaaagcagatcgcaaaatccattcagatggaagagagcacaaatcctagagcaaacttgtcttctgcaggtaagaatcttacaaaccttacagctatatgacatccagatctcttttatgttcttctccatgacatatatgcaagtcgcatcccccacacatactcctttcatcttaacacagtatgcttctcaccaaagtcacctagatctggaaaatgaatatgctgatcagatcaagcttgttgcatttaataaattagattagtgaaaaactactgacaaaccaaaatacaaacatcactatacaggagaagcactactgatgaataatgtatacaacaatcaactactaaaaacaattccatttttcagcttactttttgaaattttcttacttcactattcacctaatactacaccacccctaatcaccccaatacaccatacagtaagacattttgcccaaaatttcaacattatgaaagtttagagtttgctaatgccataaaaacaaactcctaaaaaaattacaatcacctaatactaaaattacatttgtaagtttagtctgtatgcaatgtaaatttagataaaacacaacaatagggatgctttcaagtacagagtacaatagatactgtcaattgtgtttcactgtccaaaatttttacatcctaccaaaaaaaatgcccaaagttacacagtaaagtactaacctagctaaaaataaacttaaagaggagaaaattacattcgccatagatgaaaattacatttgtaatttcaatattaaatcaatgtaagttcaggaaaaatagtgtaaatctacaccaaacttgaatacaattataaaactacttcattccaaagaaattatacatgtcaactataaaagctacttcaacaaaatttcaactaacaaatttctctatgttatttttgaacttcaatttaaacgacaaactgcaagagcaccgctctctattgaactaatatagggcgtatttatacttcattcgacataagagttaagaaaaaacagtcagaattcaatatttcattagcatgtgcaaactaacgtgacaaagcacatcgacacagcataacctgttgatgagacataacaaattaaattttacctagaaatagaacaacacaaaatttacagtcaaatataataaaaattacatatgtaattaggatgtaagtagggtataactaggatgtaactagtgtgtaagtagaatgtaactaggatgtaactagtttgtaagtagggtgtaagtataataaaaaatacatttacctgttactaaaattacatttgtagtttcaatgtataactaatgtaagagaacaaactgcaagagcatagctatatttatgacaccatattttgtaccaaaaaatagtcggcatgtatttacattgtaagttcttaaattacatatgtaattttagtgtattcacaatgtaaatatccaaaattacatatgtaaatcctaaaattacatatggatactgaggacggtcaaagacattgctagttctctgttcaagtactttcctcttagacatattgttgcccctaaaaaagaaaaacaaaattaaaaacactggcacaatatatgcaaaagaaggggccatagaaataaactaaccttaaaatgtcagtataataaacataaattcagagcacatgcaaagcgaataaaaaatgggaataaaaataattagagcataacaagcaacatgaatacaataacccaataacaaaaaaatcatatattcagtatgaactgtttgaaccaaaaatcacattctaatttcaaaaaaatcatttgcagcactatggggtgtgtgggaagtggagtactagtagaatgaatcacacaaaaatgttacatacagtacaacactagttatctgcctataatcaatttacagagtctgcataatacatagttattctcaaaaataacaacaatgcatagttcttcatactacacatgtcaaatgtgaataaactacatacatactgcaaatcagcatcaaaacttacatccaaaacatggaaaataacacacatcagaaaaaaagcatttgatccaaaagcacttgatccaaaagaatatagtactctgcatcatatgtaaacttagttctctagcatcatattataaaacgtataaaggacctgtgaatctagcatacacaatatgctctaattttcatcgggttgctactgcataaatcagccacgctggttgcatctccaaaaaagcaaatagtcacgtacaaagggtaccaaaaatgccacaaaatattaagtctgatgctactccatatatcaaacacgggaagttgcaaaatcccagcgacgctagccaagcacatatccgtagatgcaaaaaacatcagatccgtgatagttaatactagatcggtagttaatccataggtccaacacactagatccaagcttccagcaacgctagcacataggattcaaaaaacatgaacagaaaaaatcaaaaaaaaaagcacacacatatgaaccctaaaaaacaaataaatcattgctaaccatgtcagatctgtgatagttggaaggaaataaacaagttctgcactgcaaaccaaaaaggattcaaaatccccaaaacaaactgagaaaaaatgcaaaaaaaatacctggccatgaacgagatggatcaatcttcaactgacagcgagagaaattcggtggagatcgctcacgaacaaatccggcgccgaagaaggggagcacgagagaaatcgctgttcgatgatattttgtacacctttttttattttataagaaatagggtgcgtcaaaatattaattccgggaatgacagtacaatagtaaaattagtgattaattatcactaatgatacaatctggcgtgcatgagaatgttatatgacatgtgcagtgctgcccaattaatatacgggcgtttatatactcacgtgtatatatatatttttttttaatgatgtatttcagccaggatagaatatataaatatatgcatggaatagatggtagaataaatggcagcacacagctataaacaatatcactgacgaaaagaagaaacgacggtggattgattttggaagcatgtcactgtagtatcatcattagagggcaataatcacgtcatttgccggcagttgatttcctatcgatgcttccatggaaaccatggacacgcacatatgcttagaaaccagaaattgctctgacaggagaattccacaccacgtacagattgcacgtatatacgaatatgaggaaaatgatccctctgtatcattccaaattggaaaggagatcggccagtgtaactcggacggaatcatgctgaataaggatctctgttaattgaaagaatcacatagcatatggaaagaaatgctaatcgctaaattaggcaattggctgatcacgcatgcactgatcgagccatgcatgcacgtactggctggaaccgcctttcttcgctataaaaggccatgccatttcacacaacgacacacacaaaacggaggaacacacagacagaacacacacactcgaaagtttcagagagagagacacgtaccattttggccggagaatctcggcgtccggcgggaacacgtgtgctcggcggccggtgacgttggccgcagtgcctcggcgtccggcgaggaggcgcgcagaggaggagacgatcgccggagcatgtactcagccattgccatgggtatagcttattagcttttttttgtttttcctgctttttttctgttcagatagtcatgcatgcaccacacggcgacgaggcgagtttctggtgctgcccggcatgctggagatagcgtcctctccgcctatcggaggcactgccggccggagatcgcgtcgctccctctcatcagagacgtcggtcgccggtgacacatctacctgttgccgcgacgtccttgcctcgccggccacaacctctatcccacgacgtctttacctggcgatgtgatgtcgccgagacgttggacgtcgtcgccttgccggtcgcagcctcccctacactacatcactgacgtccgctcgctctcgtcgacgttaccatcttcttcgaactcatcggctggttgctcgaggagaatgccggccggagcgtcactactcggtgcccgcaaggcgtcaccagctccagctacgtcgcaagccatctcgtcggagttgtcggggatgtcgtcgagccgcctgagtccgtagacgacgcaacgctgccaagcgatgctcgccatcatccgctgcttgccggagaaggttttttttgtcattttgcctcaccggagcacgccaaagggagtcgaggcagccgccagggcgctacgccgcagagccgtcctatgtcgcggatgctgactgtcttgtgcatgctattgtatacggtggcaagccaacaaaaacaagacatgcatgcatgccactgtacacggtgacaagcaaaaatgagtttacagattcatactcatttggggctactccatagtttagccacgaccaattcggctattattcgcgttgatcattttacttttataatctaattccgatgcaatttctacgtcgtcgcgtcatccaagctacacaattccatgcatgtcttcaacaacagtataaaccaacacatcgtccaaggccgatgaggctagatggcagggcgggcggagtcgacatcaagacgacgtcaccaacaccggcgtgtggaccgacgaggccgcgaataccgccggcgcccacttacacacatctacaccaccatcaccatcatgcatgggagaacgtgaagcgaagacagacgacgacgaccagcgtagcttaatcggaggtgtctcgcgggtttaaaccacgagagtaattaaccgggtgttttccgagaccccggaaaccaggagaacacaatcgccaagttagatccacctcgccgatgggctgtggagcgcatttgactaaggattttgtatttttgtaattctatgagaattataataaaatacattttcctttgtccattttatttttgtgtacttagtacactggcacgcccacacattttatttccctgggcggggagattggagttaaatttctctccaaacaatcgcctcggcgaggtcgacggcctcggcgaggtcgctggctacgcgtcgctcgaacgagagagagaaaaggaaaaaagtaaaacggaaacaaccagcggcgcggaaaccaatatcaaatagataccacaattattaggtcaaagcgggtctgcagacaaaaaaaactgcacgaatcacggcgtccatccgacagtcagaacaggcgactgcaatcaaccacaatttatggcgccacaaatctagcaatttcgataaaaatacatcactcgctccgtacggtagaaaaaagcatgtaaaattactaaattatggttttacgttctttttttctttttttctttcccaaactaataatccaattccatattatctatgcttttatgctttgagctataaaaatatatctgattagtattattaaaagttactcgctccgtacggtagaaaaaagcatgtgacattactaaattatggttttatttatttatatattatttgaaaattaacgatcaaatatattattttgacaccaatgtcctatatctcctacttcgactacatttgatctagctcattggctaagctaaaagtctattaaactttctacaaacactctcaaaccgccatgtggtacttctacaaatactcctaagctgccacgtggcgctcttataaataagagaaaatcttacaaattatgagaaaaaagaaaaacatctaaccatcgattttcatttaattcagtgaacccactatttttgaaccattagattagatttatttaaaatacatcccacgtatatatatatatatatatatatatatatatatatatatatatatatatatatatatatatacacacacgtacgtatacgtacttccatatattgctactcgcgaaaaaaagaaacaaaatacataattatgattgaaaaaaagaagaaggattagccatgccacggtcccacctaattgctacgagagaaacgtacatacgtgctgctcaacaaaaaaaactgaaaaaattctcatatgtataaacgtgctactatccatgatcgagaaaaaataaattctcccgggtatgtacatactacacacagttcttccctactcgaatctttatacatacgagaaacatccacccatccatagtaaacttatctaaattagatgtatacagggaaaatactacgactacatttgatattaactatattttcatttaaaaattatcacatggaagcatttttagctctttgcccattaaacattctgtaaacccgccatgtagtacttctacacacacttctacgccgccacgtgacatttcaataaattagaaaaatcataaatattatgagaataaacaaaatatctggttgtcgattttcactgatatatggtggacccattgtgcgtatgtacctcctcacctatatcttttctctcctattttcctcatttagttagatgaaaaaaaattttatgttaacaaattttaaacaactatactatctaaatcatatagctaactttttattggtgtacaccattagattatttagtataaaacttaaaattaaagaaccaagttaactatatttttttcaaaaaaaatcattactttggtcatacatattctatgcactagctattgttcactaatccatacatttttaagaaaaacatcaaatagattttaaaaccttttgattaataatacacacttaaattagaataatttaagtagtttaataaaaaatacaatacctaaagtattttctaataatcaactcaaaactaggacccattctatttatcttgagaacaataatctcctcccatcctgctttacgtacacctttaccctcccctataactctcccatcctctcttctccaattcaattatctcctcttctatttttttaactaacataaaataaaaataatcatagctattgttttatttataataaaataaataaataaaaatcacattagctatattttactatataaaatttaaaatatatcatttaaaggttgaccctatcgtggcctgacaactaaacaacaacgaaaaattaattgaacatatatattatattatactaaatcactgtacgtaacaaaaatcaattaaacgccctccaaaacactcgtaaatgaccatatatcatctcctaaaattctaagaaaaaccattaaattgatgcatccattatatttgactattagatctattttattaaaataaaatcttaagttgccatgtgtcacgtcctataacagaaagaaccttagaaattcttaaaaaatgaaataccccatcattggctttcacttaattcaaatataaaaattagaaaaaaaatctcctgcacctcctccttgccatcacatgcacacaacactgttcgtcacctccctattttttatctattaaactaaaaaagaaacaacaaatactgttggatatttttttagaaacaaagacctcttttttatctattaaacttattaaactaaaagagaaacaacaaataatgttggatatttttttcgagaaacaaagtacatatgcccctacgaacgcatgcaacaaagacctcttttttatctattaaacttattaaactaaaagagaaacaacaaataatgttggatatttttttcgagaaacaaagtacatatgcccctacgaacgcatacaacaaagacctcttttttatctattaaacttattaaactaaaagagaaacaacaaataatgttgaatatttttttcgagaaacaaagtacatatgcccctatgaacgcataccctactcctatcaggacctctgatagattaggccgacatattttgagattgacgaagtcaccacaagcgtctcactgttgatggatacgtcgtctaccactgaaaaaaattcaagtttgggacttgaacccaagtgggaaagttccaccacaacaaaactaaccagttgagctacgttcacttcgcaataatgttggatattaaaacaaccataatttttaagctacatctctggaatattcctatgccttttaaaccggtcgaaccattatttctaatcgttagatatatatatatcgttatatgtattcatgctacatcacatttcaaaaatattattgtgcaattatatttcgtcgttatcgtattcatgttaggttgtgtagtacctcttacccactctacataatatgttcatagatagactgcctctcaaattatgtcaatcatactaggctatatacaatttagtggagcttcatgtcccacccaaatcatcctctaataaaccatgataataggtatgcaattaaaaagaaaaacatcttacttttattttacacttacttttactttcgttgacatgttttctaaagaaaataagtttaccttcttttcaaaagatgaagaagattataaataattgttgatagatattttttaaatatgatataatagaaagctaataggttagaaaattgtaaaagcaattaatgccgacgaaaacaatttgggagaaatcatggcagatgttctccggttaatatttcgcttttatatgtatctcaaacctattatcatacgacacatgcccgcgcattcgcgcgggctaccttcctagttaattgaaaagtattattagtggatggatagttaagtataaagcaaaaaaaacttatcgatttatgaatcaaattaggcaaaatggtatgaacctaatttattttgaaataaattttaaactctagaaatcaacttttttttaatggagggagtgaacggatttggtcattgacaattgggaagaaaattctggtcgacatgacaacgggatttatggtgtagggatagattgtttaccacccaatttgtttaaatccacaaatgagaactggtatgtggccttatcgctttttattttatttttatgctgacagtactgtcatgtcatgtgtacatgtgcgtcgcttcgggttaaaacctctccggagcgagtcttggtgaggccgggtgaaggatatctggtttcgtcgtttgggagataattcataccgtcactaaaaggggataattcagattttttatttattttatctaccagctgtaaacctccgtgtttccactttccaccgttgtaagacatgcatgtgcaggttacacagataattaatgtctcctttgaagcaaggataaatgaaggtaaaatctatttggagaggcctctcgatctcgtcttaactagcgacgctgaaacacacagagacatgcagaagtccagctactacatggtactacatgcatgcttttttttaatatacatgtacgtctttttccacttcaaacaaagttttctctcaaattacttatccgatctataatccgattacaccattgtgttcgttacaattaaatctttacaacaagatcttacatgattatagtacgatgaaaaaatatttatatttgtaaattacttttattatatatgtaagttacttttatcatatatatatataagttacttttagagttgactaaatcacttctcagacatataaaagtaaatttaatagagtctaaaagtaatttacatatattataaaagtaaattaaaaaaatggaagtaattttgtcacgacattagaagtaaatttattgtagggataaaaatatgactttatctaaaaattaaatttaatcagcacagataaacacacataagtttaacaatttttaaaagtaacttcaatgttaataattggaagtaacttttgcatggttcaaaagtaaatccctataaatctgtttaatcatcgattgtttttttcttttcatttttgtttttcatatagaatgggaaaagaagatactattgtatttttcaaattgaaaggagatactagatggagtacaaactagctaccactagctgtgtagtcacatctaattaaaaaaagacattcattaaagttactttctttttttataagttacttctataatatatgtaaattacttttagactttattgaatttacttttacatgtctaagaagtaatttagtgaaatctaaaagtaatttagatatattataaaagtaatttattatttttcatcagaatataatcatgtgagatcttgttataaagatttaattgttacaaacacaacggtgcaatcggattgtagatcggatgagtagtttaagagaaaattgtatttgaagtataggtggataatgtctcacatagatggagtggtcaaactagctaccgctagctgtgtagtcacgcccataaatgaaggatgttttaggatttgaaatctatatatataagaaaatttcgtaagtgcccattcgttttgaagaaagaattggacataattgaatcatatgaaattgtttagtaatactaaactaatactatatacatactattttttaaaagaaaacaattaccagggtatatgaaaaaaaatgattgttcataaataatatagttgataaacattcatctttttttacacttcgtcagataatagttgatgagttgactgataaaataaactaactatgattagtggtcaattctatgagcctactatgtcagaactgaaccactgtagcatcttgttgatattttgcaaacagcaacgttttggcagttgtaaggagctgatcttcatgtttggcagctgtaatgaaagagcagtagcttagcaacggtggtttcgaagcatttcgctctaccaaaattttctcacgtcatctctgaacacgttgcaaaggctgaaactttctaaattgtgcttataataacaggagtagtcatcaatccgtgtattgcacgctacaattactccctctgtcctaactataatacgtaactaggagttcaaattttattattccaaatataacaataatccaatatttatgaaaaaaaaatttaccgttgaactatccatacaacctctacccctactcttagcacccaattagcttcacgatagcctaaactagtctggacatatatttcatccaccccaacaagacgacagagtatttttacgcatcttcttcatacatgtgctagaggttaaaaattgttatatttcaagtccaagagagtatgtactaacatttatgattttttttcagatattatattttaggtcaaagggagtatataccggaattctaaaatttagattattgaattgaacagttctatacacattttacatgattgaataattattaatatttttattttttttataaagagcacgaatattttacccttacagaatctacagtccaacaatagcgtgacaaatttgcagatgccatattcaagcataccgtttgaagccatgtatagactacagtagcgttgctggctttccagtttggtgtcctaatttcgtccaacctttttgcatgcgtgcggacaaattctaatgattgacacccatatctctactattataaaaactagcatggcggcccgcgcagattacgcgactagcatcattatattttttctcatataatagcaaatacattttcttaatttattattaaaattgacggagcgtggggctcctcgccgggagaccgcgcagcccccctttgccggttcggccggggccctgggtgagattctaagctcctggtctgtgtgtggaaggtccgcgagactggaaacacacaagacacgggcgatgtatacaggttcgggccgctgagaagcgtaataccctactcctgtgttttggtggatctatgtatgaagaagctacaaaagagctggagaaccagagagctcttactctctccctctctgatcgttctggatccgaaaaaatcccccttctaagtgggcaaggtcctccttttatacctcaaggggataccacatgcaccatctctctcttttgtggggacttatcctatcttttcataaacagacggagacttgtatggttgtcgtccgaatgaccttctgatgggacggcccatacctacctccacttccgccggaagcaggcgcgacgtgggaacatggctgtctgctgacgacatgaccagtgtcagaccggtcacaaatctgtcattcttgtccaccacgcgtcagtttatcaatctgcatgttcgtccctcttcatacaatgtcttgcttgtaatggttaggatgaagcctggtatatatctgaccggaaccaacgtgccatctccaggaggtaacacgccggctccggctagggacgagtgcttggaggctcttatcttgacgggatggggcgaggcgtgcgtcaaaccgcctgtcgccacctaacccacgatctgatcggtctgtgactggtcactgaccggataaacgagcgcgctgcactgcgttacatgcggcgtgacgcgctcgtccaaaccgcaataaatgtggttaggtgagccccgctatgctcacctaccccatatacgcggcgcaaaacccacaaggggtcggggcgcctcggctctcggggccgagacgggagcggtccgacccctcggggagacaaagagaagggcggccgtatcaccctcgggcccgacccccccccgagggggttaggccacgtgggtgatcgtgtctgcctcaagtctctaagtcatgatactcccggtcccatgtcaccgacagtagcccccggcgttatgccagggcggtcgccctcctcgagggaagcggtcgggcgtgacgccacttcctaaggcctggtgacaggtggggccggttcctacaggtgccgtcgaactacatcacacagagggcggtgtgaggcagctgcgatgggctcgagctggcctcgggggcggagacgagctcgggagctggggtccactccaccacaaagtcggcgagggcctggctcttgatcgcgtggcttggttcaaagcgcaaatcgaattcagagagtttgattgcccatttcaccacccgtccagtaccctctcggttatacaagatttggccgaggggataagacgtaaccaccgtgacccgatgcgcctggaaataatggcgcaacttcctcgaagttatcaggatagcgtaaagcatcttctgggcctgaaggtatcgggtctcagcgtcccggagggcctcgctaacgaagtagacgggccgctgcacctttcggcggggccgatcttcttcgtcaggggccacatctccagggcgctctccatccgagaggccacgcggggcgcactcggcttctgtgccgacgacctcggggtcagagggcgacaggcgcggccttcccgcagtggcctcggggccgtcctgggggtcgggggcgcctggcaccgtcggacaagcaggcggagggccagctccggccgtcgggggccttgggccgccgttcggctcgggggcctctcctccctgctctctctctcttcgggcagaatcccggtggtcgcaaatcgcgcgcatcagcaagggaaaaccgaccgacaataatgagcggcccctcggctcgcgtttgccttcaactccgacgaggagtgcggtgacgacggtgcggacgacagcgacggcgaggccggctacccgggcgcgtcggagtgagcccccaggcctccaccaatcttaatagcttttccttcttcttccgaggccttcgggcccccttcttgttataggctgatttaatctgcaatcaaataaagaggaaatttttgtgtcaatttcatttgttctgtgtatgagacgaggatgtctgtgccgtggtccttttgtgtcttggcttgaacaagggctcgtgcccaggtcccagcctcaaacggcgcgggtcaaggctagtgcctggggagatccacatgtcgagactggccaggccgggagcgtggtgaccgagggttatgggtgacccgattgtgggtttttgccgattcccccccggagttcaccacgtcccggggcacggctcggttctgggccccttttggcgattttagccgacccgagcccccgagggtaggattgagcacgagtgacctatttcaagtcaagattcttcaaaaggaaacaaaagcacagacacagcctttaggaaatcaaaaatgcttttattgaaatacggaagagaaaaaagataagcccccggccaaccctgcacgcccggggggtgcggggttggcccgagcccaagacctgacacccgacccccaataggggtagaagcgacgaaggtgttcgatgttccacgggttaggcagctctgtgccgttgcccgtggccagccgaacggagcccggccaggggacgccgatcactcgatacggaccctcccacattggtgagagcttgctcaatccagcacgcgtttggacgcggcgtaggacgaggtcgtcgacgcagagtgatcgggcccggacgtggcgctgatggtagcgccgcaggctctactggtagcgcgcggctcgaagggccgcgcgccaccttcgctcttccaagtagccgaggtcagggagcgtcggcttccttctttttgtcgttcgcaggcctcccctttcgggtggccagcgaaacgccttcgacggcgaggacatgaccctcgtcgtcggaatgggccgacctcttcttcctcctcctgtcccgccgccctgaccgagcggcggacccgggggcggccgaagctgccacaccggaaccggaggggttccaagtccaggcctcctccttgcgagccactcggtccgcgaggtgaaaaagctccgcggtagtctggggctctttggaggcgatcttttcgagcatgcggttgtgccgcacaccccccctgaacgcgtagatcaccgcgtgtgcagggatgcatggtatggtgttgcggatttgacagaaccgctgaatgtatgagcaaagtgactcatcatcccttcgctggactgcatgtaagtccgcttcttcacctgggcgcggatatgtgccttgaaagttcatggtgaactgttggcacaaatcctcccaagagtggacggacgcgggtggaaagttcattagccaaccccgtgcctgtcccttcagggccatgggaaagaaatttgccatgaccctgtcgtcacccccggcggcctcgatcccggtcgtgtagacctggagaaactcggcggggttgacgctcccgtcatatttttcggcgatggtgggccggaaccttgggggccaacggacgttccgaaggctcgccacaaaggctctacagccgacaccaccaaccgggggcacggagggctaatccccgcgtccgtgttgatgtgacactccggacgaggaggcgccccccgttgcgtgggcagcacgtcggccattacgccggcgctcgatactgatgcgggcatctggccccccacgcagatcttcctgggtcggaggcgctgacgaaggagtgacggccgaatggcgagcaacagccgctgctcgccgcgccctccgccttgacgacacggagccggtggtagctgcgccagaggtcttggtggcggaggaccgcccaccagcacctaggcgctgccgtgccgtcatgaccaagttggccacgtcgtccagccaacgttgggctggagactccgggtcagggacaatgggcgggtgacgtaggagcgcgcccgcagcttggagcgcgccctggggtgtgctgccgtcgccgtagacgaggaggcgacgctccccatctcgccgcccttccccatcacccgtggatgtcgaagtagcggatccttcgactttctcgagcgcctcctctcgcctaggactttggcgtggagggggcggtggagtacgagctcgacggcgtgggttcggctccccgtcgtcaccgctaacagtcggagagaggttgtgcgcctttgcttgttcggccattgggctgaacaggaaaagcttggcgcacacgaaagaatgcgagagcttagaagaacacacgcagaaccccctacctggcgcgccagatgacggagcgtggggctcctcaccgggagaccgcgcaggcccccctttgccggttcggccgggggccctggatgagattctaagctcctggtctgtgtgtggaaggttcgcgagaatggaaacacacaagacacgggcgatatatacaggttcgggccgctgagaagcgtaataccctactcctgtgttttggtggatctatgtatgaagaagctacaaaagagctggagaaccagagagctcttactctctccctctctgatcgttctggatccgaaaaaatcccccttctaagtgggcaaggtcctccttttatacctcaaggggataccacatgcaccatctctctcttttgtggggacttatcctatcttttcataaacagacggagacttgtatggttgccgtccgaatgaccttctgatgggacggcccatacctacctccacttccgccggaagcaggcgcgacgtgggaacatggctgtctgctgacgacatgaccagtgttagaccggtcacaaatcggtcattcttgtcctccacgcgtcagtttatcaatctgcatgttcgcccctcttcatacaatgtcttgcttgtaatggttaggatgaagcttggtatatatctgaccggaaccaacgtgccatctccaggaggtaacacgctggctccggctagggacgagtgcttggaggctcttatcttgacgggatggggcgaggcgtgcgtcagaccgcctgtcgccacctaacccacgatctgatcggtatgtgactcgtcactgaccggataaacgagcgcgctgcactgcgttacatgcggcatgacgcgctcgtccaaaccgcaataaatgtggttaggtgagccccgctatgctcacctaccccatatacgcggcgcaaaacccacaaggggtcggggcgcctcggctctcggggccgagacgggagcggtccgacccctcggggagacaaagagaagggcggccgtatcaccctcgggcccgaccccccccccccgagggggttaggccacgtgggtgatcgtgtctgcctcaagtctctaagtcatgatactcccggtcccatgtcaccgacaaaaatatattcctaactccgtttctaaatatttgacaccgttgactttttagcacatgtttaaccattcgtcttattaaaaaaatataaaatatgtaaaactataatatttagaaaaagtatatttaacattgagtcaaattatagaaaaagaattaataattacttaattttttaaaataagacgaatggtcaaacatattttaaaaaatcaacgacgtcaaatatttagaaacgaagggagtaaaatgacaacataattttaaattttatactaactttaccaaactacaaatgtataatattcatattgtattgtatatacgtgataattattaattatttttaatatcaaattttagttagttctaaattgttttcctatatagactctacactcatcttccaatattccttattttttaattttgaatttttgtatttgtaaattgtatttatataaatattatttatttttaattctgaatttttattatttctaattgtaattatatgttgtaagatcaatgtgtgttttgatttttattctgtgatgaacaattggcatctgtgattattggattagatatttggagaatatcgtcgaagtggttttggagataatcaattttcaggtgatgattggattcactgttattttatgtgtccggtccgaccgggcggaggttgccggtcagaccggtgctatgtgtgcggtcagaccggccaggcccgcggtttgaccggccgacgctgtgtcggtttcggtttcgggttttttctttggatatccgtgattgtttcatggttatggcttctagatggattctatatgtatgtaatactgttgtttgctaacaatgagtcaagttggggatagcttggtctcggaatatggtttctttgtttatttcatgtgtaggtgactcgatacctcgggagagtatttgcggtgatggaccgggagtcggcttggtggtaagacgatgtccgtggtggtcagatagcatgcgggatactaaggctagagttgatgcacgtggttggtaaagattccatatgacatatgatggaggtattgtgtgcgtatgggatgcggagtcaaatttgaaaggagtccaaatttggtacggttggttatgtaaagtttgtttcttgtactagagggtttcctaaggtgtttagtactcttaatatgagtttggttcgtggctttaggctgcctacctcatgtataaatagagggggagcgtgaggcttcctgagatcgcttttgtatcgcttttgagagtaatagagttgctagtttagttagggtttcgagtttagttgagatttttgtaaggactgctgttggtgcactttgtaaacacagagagaagcaataaagttgtcatctactttgagagttcttcgatttgtgtttcaccgggtttcgacggtctaaccggcggcgcaccggcggtcagaccggcttcggcgacagaaggcggcgacaagttttggcggttagaccggtagacctacaccggtcaggccggcagctacgctccggtcaaactggttaatctactccggtcagaccgatctccttcgaattcgagggtaacttttatttccgctaaaagttttcggtttttgggtataccaaccattcacccccctctggttggcttagttcttgtatttcgatccttcgatcctacatatgtgaactctaaactcatctttcaattttgaattttagttatttgtaaattgtatttctatatgagctctaaactctactttttaattttattatttttattctaaattctagttaattctaaattcctatatggactccatactcttcttctaatgctcttttttttcattttcgaatttttattatttcttaattgtatttctacattgactctatactattcttctacctaatttcaattatgtctaaattgtatttctatatggactctatactattatttcaatattctttttttaaaatttcaaattttagttatttctaaattgtatttctatatggactctaacctgattttaatttttcttttttttttaatttcgaatttccattaattctaaattatataccggcatggactctaatcccctcttccaatattctctatttttaatcaatgttgacgatcacggcgagaagtttgaacggctagaagtattttggcttgttgaagatttttggcttgctttggttaattgtaaatttggaaacggtgcagagtttctagcagtggtgtgaacacacaaattcctaaagcaatgtctgtttgcaatgtcctagtatacaaaacggtgcagtgtttttttttaccttcttttcgtttttaactaatcctattctcgttccaaggtattgtccgcttccagtgtcctattatgctttggtttttttcctttttcttttttcttattttttggattaatatgagattttctaggctgtgagaacaaacgtgaaggcttctttttctgttactttaataagttaatagattgaagatgtttttatcggaactttcgtacgtcatccgtgtatgagtcagtttttaagttcgttcgcttttggaaatatatgtccgtatttgagtcgacttttaagtttgttcgcttttggaaatacagaaggagtcgtatgagaaatctctttaaaagaactcacatgctaacctgagatgatcagactcctaaccgcagctcaggattttcaaaaagaaaatatatccaagagaattgccataatgaatttcaccttaactaaagaatataatagaaataagattaaaatagtcttcatccgttacaacgcacgggtattttttctagtcttactagcataaaaagtcacgcgtttgcgtgactttgataacctccctctctattaaatttataataataattagcaatatacatgtgtattcggatatgtttgttgaatatatttccactgtagctataacgtcatcagatttactttttcttttgtaattaacaatattaccatgttatctaataatttatcatatatatgttgacacgacttggtacacctgatcattctttgtcataaattacactttcttatttttacgctgaatttggattaagatttactttttaaagtttggcggtagcattacatctttttggttcattttgtttgaaaaaggacatatcctgtagtaagaaataagtacctagtgactaataggacagtagaacaaatggggctcccaaaacttcaaagtactcagctatcgtacgtttgaaatattagaccactcatgggatgttaattttatactacggtctttctagtgagctcctaactccagcccctcccctgtccgttttccgcgcgcaagcttttcaaactgttaaatagtgtgttttttaaaaattttctacacgaaagctgctttaaaaatcatattaatctattttcttaaaaaaatagtaaatacttaattaattataagaaagtgcgtctctttattttgcgtgcttaggaggtgagttaccagcctcacctcccaaaacacagcccaagtttttctgtaaatgacacattctacctccagcccatttaggccagtcattaggacctccccggcccattacgcctatttgatggcttaagcagggaaaagtcactgaccgagttccgcttgctaatatgcgctgctccatcggagagggagatctcgcctcgctaataactctttcctccattgttgttctcaaaatcctgggagatgggattgtatgtatccaggcggcgggctctacctctcgataacgggctcagccagacagccacgttgcttatgagggggaaaggttgttgggtttagtcccacattggtaattgatgatggaggagcacgacttaaaaggtgggggcggtcctcacccatcatactagtctgttgggttatataggcccaggaccaaaagttgtggctccggttggacctgtggtgcagcaggcctaatgtgacctgggtggctgacggttgggtgggctgggctgcatactcacaagtggtatcagagccaaggtttagaacccgaaataattttcatgggtcacacggttgggaggcgcccatcatcgcctccgatcctcggattggactggtgtataaattgagtggtttttatttttgctttttctttctctcttcttccaggagcctcttccaaagtattcactctgtatctctctcccccacgtatgggagctggaaagatgcagaacaccatgttttgggccagagctagaatgacatggagaggggtgctacttgtttaatttactccactttatattaaatttaagctaatgtgggtgtctaaatttgtttaagggttgtgcatactcggtgaaaatagatcaagtatgggcctgtttaaattctccaaaattgccattttagatctaaacactagtaacaaaagttggcaatttgacatttggcatttgctagtctagggtagcaaattttgctaaaaagtgctctgggaccacacgctctctctttctctctctggtgctaaaatggcaaaactttacaatgcatctaaacaccaactccatgccaaatcttttaccaccaaaactattgccaattaccatttatcgtttcaaatggatctaaacaagtcctataaccataaattttttcttgaccaggttcctaggcaactgcactcaataatgtagctccgctcctggttttatcgtttttccgctgatctgatccaatggcaatatcccttctttttttttctccatctgatggttcagatgattttgcttacgtggatcaatctggtgaagttttaggaattacttttcccttatagagactagtgcaagaattcacgcattcgcgtgactatcattatcttttttactgatgtttaagaataatctattactgatattatatcactagataatttattgtgaaaaatatataaaatttatgtttttttaagaaagaaatgtttttatcatttcgctcaaccacgcaaagatttatttttttctttatttctcatcggtgtcttctttgctctgtatatctatctctcccacatatgaaggaaacaccggaaagctctcgaataccctcctttattcaatggctaagaattattttacctattttgtttgcttattgatctaatggctattattcattggatgatgatgtggcacattcttgttctcttttgggattgtcttttcaagagttaagattggtaaaatttgctataggatatttaaaatgtgtgtaatttactaatagtcatcgtaaaaaacgtattgcagctatataacacttttacagaacatcaaaaagaggttggcactatcggcatctatagtactttttccgcccacgcacccacgctcgcggaggagcaagcgccaaaaaccgccaccattctcttcaaataggtgtcggtttttaaatagaaccgatacctattttccctgtcgagaaagatgtcagttccatataaaatatgacacctttcacgtacatcccatcggagttattcgttgcggagcgcacaatagaatcgacacatttgaggttaccagagaaaggtactggttcttaactagaaccgacacctttgagtcttccacctagctagtagttgttggagggcccacacttaaaaatcggcgcccaaaattttgtcagagataggtgccggttcttgttaagaaccgacacctgttatcttagtatatagcatttccccatccctcgagttgatggagcaaagaacagagcagtgcctctcgttcttacttaaatttagaagttccagataaaaaagctatgaaacttattttaaaaatgttccaaactaaatatatccaacgcgacaaaaagttggtaacaccaaaatatgccaaattttgatagtgccaaatattggtaaggttgattttggaaataaagtgaagaagtccttaggtggaaaacataagtcatatagataattttctttgataagtacttttacaatattacaatttttttaagatattatcattatattctaatgggaaaatagtgttccaagttacataccaaaaccaaataaaatcaatagatcatatatttaagtacagtggtaattaatagcatataaagtgtttagctcatcaagtgatacatgtttgtatgttgtttcactttttttacctctatttataatcccatgacaaattgaatttatatttggagttccttttccactaattcaaggtgcattgcaagcatcaagtgtatctcatcatcaaattcgacctatacaagttgactgtgaatagaacgtgaaccattgcaatcatatatgttgtttttcttacttctataggttaaatttgcacatagatgtttgtggaatgacatgttggcggctgttaaataccagttttacgccgccaatacctacataaatctgaaaaatataaaacatccaatatagtggtagggtgtaattctaagaatttccactagtgttggtgtatatttggatgcaagtgacaaactaccaaagttgagacaaaatatacataaaagaggaggagaattacatccatagagtcttaggcccacaaactcatcgaaacacatacaattgggcccaatcaacacaccactggactagggacccacttgtcagagcccaggaggaagaaatgggccagggaagctagccaggggtcggccaaggtcggtagtaaccgccttccaatgacggttactaccggtattggcaccccaaccgtcatactcaggctataaaaggacatatcctccttcacttcaacacacaccaaattgagctaaattacaagatgcttttttatcatttatgtatacttagaatagggagagagtaaaggagaaagagtcgaaggaattctggagttgtcggtactttcctctttactttttataccttgtcaattactttgctttaattgataatatcttatcgagtaattgagttttactttgtaaggtatatttcttagttagttcctattagcgcactagtatattgttcactagaaatagtgtttactttaatgtttgatcggcactatagtagtatttaatagtgtagacgtgatatctatatggcatgtatttgccgcgtatccacagttcgttagaggttggtgtagaggtcgtgacagccatcgagatcattgtagtcctccctgtccagatacggagtagagcgtattctggtagcagcgagcaagccggtgcctaaagtattgcgataggattaaaattaagctttctaaagaccttgtttctcaccagaaaatcctctctagcctttgcctattttttgtcttgtgttcttcgatgaacctattccatgtggaaattcgatacttggaatactcctagatgaagtgctatagcggtatatctatgcgcttgcggattttatctgtcgacataagaaatactaacaacatatcaaatcaatctatcttactaaatttttggaaatattttagtgacttctaggtgatatgtaaaagcgaggaggcatcttaagagaaaaaagacctagtattccgctctgatcgccattcatgctgtgcaccatccatcttagccatgccacccttagaatgcgttgtcaatcagctacagttatcagcagacccattaccacattatcagttgtcactctcagaaaacaaatttatatgttctccagattatctttctaaaaagggtcaaacaaagaaatgcaacaacccttgaacttattgttcttacaagagtccaataaaacattttgtataaactaggaaggtagcccgcgcatcgcgcgggcatgcactataaattatgtttgaaaaaaatatataagatggcagaatatcagccagatgacacttgtcatttcataagtactgtttatccataacttatctcatcagtgttgcttagataatttttccaatctatttgttagcttttaaaatacataatatttaatacattcatataaacaattatctatgatctcttcgttatctagaaaggagttagatttaatttgtttggaaacatgtgatgttttgtcttgtttaataaaatgtttagggtctttcttttttttagcaaatcctaaataactattattgaaaatgaatatattttattttttaatgaatatattttattgacgcaatttgttatatatttatatataaatttctaaagatatatcgtagatctcccttccctaatatatgtgtgatctatagtatctttctttttttaaaaaaaagaaaatacctagtcaatatgagtctgaacattttagtaattacaaatgtaacttctcaaccaactataaaccgcaaacattgtgtggcttatatatatacaataatgtgcagaggaactcgtaatgtcatgaaagtcaataatatctaagcacttaaaaaataggaacatgtataattgttctaattttagtgaaaaattaagtttaaaatataggcgttatggatctttaaattgttggtttaattataaatagagcaatttatattagaatcagatgtgtggctcaaaagatatgtatgctttaatattattgattatttctctttttattggttataaaaatatcaaggagggtataggggaaagtgcgagccgggggatgaggggacgggtagtgttgtgtttgtgcatatgtgaggagggggtaaagtttggggggtgggggcggggtttatttcctagtttttataaatgatttaaataaaaaccgatgatttattgttttgttcctaaaatttcgaataatattttttaattattaaaatgtaacacctagcggcttaagattttttttaaaaaaatagatctaatggtttaaaataatggatatacatatttaattcataaccggtggtcaaatgtgtttttctataatttctaagattttgtttttaatttaagacataacacgtgacatgtaagtgctctattgagaatgtacgatgatttaaggtgatatagtttgtttgattttttttatttggttgacacgcataggtgtctacaaatgacgtattatttacagtgaaattgggtaatatagatcttgaattatttagaagatgttttaaagaacattgattggatatttatcatatatagatcttaattttactaaatatatttatatttgtgaagtaatatattttacttttatattgttgaacttaaaaaccatatataacttaagaattataatcatttagctttctaattattttttgtttttatattaagttgctaattagttaaaaattagaagaatgaagaattgaatgagagaggagaggaggaggagagagtacgtatgtagttaattagttactattgccttattgtatcataattgatccaccgatttgaataaaaaattagacttgatattgaaggaaattcttagggtttccttcaattttggggaggactcatgaaaatgatacgtgcatgtgataaattgaaaaagaccaacatgtaataattctttaccaccaaaatatagctaactaatatgagtcttaaaccgttgatttgattaaaaaacagtagttcaagtgtataataaactgaatgtgtagttcaagtgtatcactgtgatcactcctataatttaggtagcatgcatggtgcacagcgagctcctgcaggctccatatctctaacttattgtaacaaattatgctttgtagcttaacaaccttggagaaaaaaggggagatggagaggagtagatgcgtacctagctatctacgtcttgcgtgcggggaggaggtacgcggcgttcggagatgagaggatacggattagcttaaatctaatggctcaaaataatgggtccacctattttaagtgaaaatcaatggttcgaattttctctatttattataatgccacgtggcgatttaggagcgttttaaggaagccacatggcgatttgagagtgtttttagaaagtttcatggacttttagtatataatagatagtattggctcaagttggtcccattacatttgaatgaaaataatagtataaagtaatattacacagtctatttaccttttccagaacaatttacgaagtatctgaaacaaagtcttggattatggtgcgaaccactactggaatcctcaccgaatgtgtgacaccatctagccatgttaagcttccaaacgtgtagcctgcttgtactctctgccttgcggtgaatgtcaccttgaatgttgcacttctactaccacctctggtgaatgtgataattgaaggttcaacagacatcctcacaccggctggtgcctcaattgatgccttgtaagttccttcttcccctccgacgttggttacagtgcgccaaaccgtgacagagtccttaaggtctggcacggcgatggatggaaggttgagctgatagagctggcccacataggactcacagtcatccttagggccaagggtacagttgaaaaacttagtgtattccttcgggtcaatgtcatagacaagcccagggtcaatggacttgtctgggtcgatctggccaccaccaaagtcgaatggatcggcgatcttcctaggtgctccctcagcttgtattggcataccaaaacgatcggtcaccgatgctgcaatagtagagagatatatactaatagtttgttagtcctaagttacccatataaggtatatacactgaacttgtagtgtggcatgagtacatgcctgtggtgacaatggcagacttgatcatggccggcgaccagtccgggtgaaccgacttgagcagcgccgccaccgccgagacgtgcgggcatgccatggacgtcccagacatgaatttgtatgagtcgcccacagcagccaggatgctgactccaggtgcagatatgtcaggctgttgaacacagaatcggatatcagaaggtaatttcacacataggaatcaagaggaacgccgttaattatctcattgttgttggatattcatgtcaagatcaaggtcgttgttgtcaccttgaggatgacaggaaattcattgctcgggcctctcgacgagaacatggcgatcctcggtgcgagtaccccattcccaaccacgctcaccacccgagatatcttcaccacagatttcctgaaacaaataatatacgaagaacatttcagagttttcagaggagcacaaccaggttctgattactttgtcccaatgtagttggtcaccaaagagctcgaactctcaccttgtgcttttggcgtaggaggcgatcctgcttgcgatttcgtagtcgaccagcacgcagctggccggcagatacaggtggcagaagtcctcgaagccaaccaagacgttggcgctgtactgcgcatagatgagacccttcgcgcgtctcttcacgacggcgacgaatgtggcggcgaacgagctgtttggtgacgagttggccgcctccaacggcgccgagcacaggacgatcttgccggtgatgttgactgacgccagagagtcctcgtcgcatctgcgtcaatggcatatattggcattggtcagcgtcactcgttaaattttgtaggtgcagaaatattcgtatatataatgtgttgactgctagctgcgttgttctggcgtctggcgatgatcatttcgttccgttacctttgcccatcgacgagcatatgaaagttgctgctgttcattgttgcattgtagttaagagattgtccctggatttaaaatcgacatgaaaaaagaaataatcactattaacctttcacatagtgcaggtgtgtcttttgaaagaaactagctgggcggcccacgcaattgcgcggctagcacccaaataaaatcatatattttttaatatgattttacttaaaatttattaaatagctatcttattgtcttaagactttgaaagaccaaaccttatcattctcgtgtttctaattatatagtttttaaaagtcactccagttgctaccttttatgtcacctccttctttatttgcttgctcgatctaccactacttcaatccattcttcttggaacctttaaaaattggattttatagtttttgagtttattgtcatgatgggtttcgtttttataatttctagatgtcccgtcaaatgttgccattatacttctctacaacccgtccactgtgcctcttctctttattgtcattgagattttaaaattgaacataattatcgtttgggttcatttttactttctagaagtcccaccaaagtccaaaccgtcagcggctttgccattgtactcctctacggctcgcccgctgcctcccttcgttattatcatcgagattttaaaatcgaacatggttatcattcgttttttttttactttttagaaattacaaacatttaaaaattggacttgtagtttcattttttataatttttagaagtcccatcaaacgatgccactatacccctctacaacccgtccgccgcctactctttattaccattgtgattctaaaaattgaacataagtatcattggaattcattttttattttctagaagtcccgtcaaccgtcggtggctctgcaactatactcttatacacccgcacgccgcttctcctttttattgtcattgagattttaaaaatcgaaataattatcaatggggtttatttttttttacttatagaagtcccggcaactgtcttacttgtttgcttcacggcctgcctgacgtccctccttttaatcgtcattaggattctatttggtgttttattaataatttttatatctcgtatcaaccgccactactttactcttttataggcctgttacttaatttatctcgtcatgtgttttagatcgtcttctctttcaatagtctttatttttatcacaaattttagttatttataaattgtattcctaattgaaatcttatttttctttttctaatttcagaattttagttaataccgtattatgttgttttattgtttttattgtttattttcaatttcagctgtttcaaaattgtattcctacttgaactatcttttaatttttctaattttggatattattttatttttttattctacattttaattaatctcgtattgggttcttatatggattcttctttcaatattgcttatttttaattctgaatttcagctaattttaaattttattcctgcttaactcttcttttattttcttttgttaattttggatttatttttatttttatttcaaattttaattaatctcggattgggttcttatatgaacttttctttcaatattccttatttttaattccgaatttcatctatttttaaattttattcctacttggactctcctttccttctctaattttttattttattttatttttattttgaattttaattaatctcgtagtgggttctgatatggaaacttctttcaatattgcttatttttaattccgaatttcagctatttttaaattgtatttctacttggactctcctttccttttctaattttggattttattttatttttatttcaaattttgattaatctcgtattgggttcttatatgaaaacttctttcaatattgcttatttttaattccgaatttcagatatttttaaattgtacttctacttggactcttttttctttttcttcgattaatgtgggaatttctagcctccacagcgaatgtggtgcttcctttcaaagctgttttaataatataatagaatagatagatagatagatagatagatagaaacaaacagaaaaaagaaaaaggtcggtggtgcgtaccacaagcttctctttgttcccgagcgatatcacggttggaaacgagcgatcgatggtgctagcggccaccgtgatgacccacggcacggcgttcgacacggactgtggcacggggccctcgttcccgccggcgaacaccacggtgatccccctcgccacggcgtgcagcgtcccggcgacctcaccgtaccctcccagcgacagcgacagcacgtccacgccgtcgtttatggcgtcgtcgatggccgcgaggacggacgcgtcgccacacgtggagttgctgtcaccccagcaagccttgtagaccgccagcctcgcccgcggcgcacctccgcgggccatgcccgcggccaggccgctctgccggtggctcacgttccacacctgcccgccgacgatcgtcgaggcagtgtgcgtgccgtgtccgctaagatcccttggtgacatgtactcacctttcactagtagagaaaccatctttcgtcggtcggccgatttccacaatagtcccggatgcaataaaaactggggctaaagatgatctttagtcccggttcaaaagggtaacgggcatatttgatctttagtcccggtttgtgttaccaaccgggactaaagatcatctttagtcccggttcgaatgctgtcaggacctgtcaggcccccccgggatctttagtctcggttggtagcaccaaccgggactaaagatcttaacttaccaaccgggactaaagatcccggtgatctttagccccggttggtgctaccaaccgggactaaagatcttaactttagtcccggttggatcccggtgatctttagccccggttggtgctaccaaccgggactaaagtcccacccctatatatatgtcttcttcctcctccagctgcccgagcaagcttcaaaatttcttcaaaaaagaggggaggtcatgccaaaatttctattgaatttattttggtgattacatacaaatcggatgtgcctaaaaggtttgcaacttcatcctccaatgttttttttgtcatactacatttgcacctatgttttgcacactttttttgtctccaaaatttagttgtaagttgatgagagagaaaatgtgtgtggggaagaaagaatatatagaaatttagttcatttgctaaacaaggttttataaaatagttgagaaggaaaactctagtgaaagttaatattaaataatagaaaacaaactaaaataaaaattaaaagaagtaaaacacattaaaattagtttaaaactttacaaatagtttttaagaattatttggtgtgatattttatgatttttgtatgaataaagatatcttataattattgtatgactgtcattattgtaagaataattatttgtgtgcggtttttttgactcatgtagatggatcggcaatggatgtacgctgaccggcggtccaaagagtttattgacggcgtgcactattttttgagagtggccgaagctaacaggcaaaggggttttatttgttgtccatgcaataagtgtaagaatcagaaggagtattctgcatccaggactattcatttccacttgtttgagtcggggttcatgccaagctataattgttggacatcccacggagagcaaggtgttgaaatggaagaagatgaagtggaagacgacaatattccggactttgctcagtatgttggatttgaaggaaatcaaacgggcgaggaggaaatagctgctgatggtaacgacgttgcggatgatcttggtcagatgttgcaggacgccagggaagactgcgaaagtgaaaaggaggcccataaattggacaagatgttggaggaccacagaacttcgttgtacccaggttgcgagcaggggcacaaaaagttggataccactctggagttgttgcaatggaaggcaaaaaatggggttagtgacaaggcatttggcgatttattgaaactcgtcaagaacattcttccgggggaaacaaattgcccgagacaacgtacgaggctaagaagatagtctgcccgttaggactggaagttcataagattcacgcatgtccgaacgattgtatcctatatcgcggtgaggagtatgagaacctagaagcatgccctgtttgcaaagcactacgatacaagattagacgggacgatccaggagaagttgacgggcagctaacaaagaagagaattcctgctaaggtgatgtggtatttccctataataccacggctaaggcgtttgttcaggaacaaggggaatgctagaatgttgcgatggcacgctgaagagcgtcaacaggacgggatgctttgtgatgtcgatgatttgtgatgtcgagagatgatatttttttgttttgatttgtaactcgaggctcgatccctcccgtcccggcttgatctgggcccgcgcggcttgatcttctcaccgccgtgaccatcggaggatggcggctgctcggggttcttgatctggatgaggtaggacgccttcgaatccacgttcatggcctcccgccgctcgacggcagcgtcggcatcatcgtgacaacgggccggcgaggggagctcgagattgtagatgggtgtgcacgcggtggccgtactcgccgctagcctgtgctgtgtgcggtgtgtcatcgtgttgttctgaaaatcaaaattcaaaacaacgatgtcacattacatcatagcatcggcttgcacatctggcactgacaccaatcaatttatgattttgagccgcaatttggtttacatcagaaaaaattatcttcgaatgtggtgccgagctcgacgtatccccactctccagtagggccggcagcggtcgcgcaggctcatcttcatcttcccatcaagaattcaagatcagccggggagcagcggctgctcctcgatcgatgttcacctcctgcaatcaacgacaggagcagcttcgaaaatgtccaaaacatctgtaattctctatctttccctacgccagtagtacgagacaacctccttcccatgtctgccttcgcggccgtcatggcgtcatggtcgtgctgcttcttgtgcccattgacccattcttgccgtagtccggcgcatgcttctccttgacgccgccgacggtgacgagctgcacatctaccgctacttggtacagtagcggtggtagcctgataagcggtggcaacccagggtagaggcagaaagcgacaacgactccctcgatatatatggaggttgaaggaggattgacggtgaacgggcaggcggtgtcctcttgctcatgagccgcttacgctcagatcgagccgggacagatcaagcgccatcagccgcacgcacatagatcgggctcgggtgagcctggagccgagcggagcgccccgtccgattgatacatcatccacgcgtcaataatccagagcagggctgcagaagacggggtttgcatccggtctccaccaaatttttttcccatgtgacaggaacttgtaacgtgccttgaatacgtgcctgtggtgataatggcagacttgatcatggcaggtgaccagtcagggtgaaccgacttgagcagcgctgccacagctgatacatgtgggcatgccatagacgtcccggacatgaacttgtacgagtcgcccacagctgccaggatgctgactccaggtgcagctacatcaggctgttgaacacacggacagaatcaggttttgacaacacccagaaagtagtgtcacatactcacattcacatatatatggagtatagaaagtagtacattcatccatgtcaaggtcatggtctttgttaccttgagtatgccaggaaaatcgatgcttgggcctctcgacgagaacgcggcgatcctcggtgcgagcactccattcccgacaacggtcaccgcccgagatatcttcgccaccggtttcctggaagagatgatatgtagaagagtctctatgtagaaacatttgagtgttttcagaccacagccagttttttgaaagttttgactctattcctatgtaacttgtcttcaagagctcgaaactcaccttgtgctgttcaaataggaggcgattctggctgcgatttcgaagtcgaccatcatgcagcctgcggggaggatcttgttgcagttttctagatcatcgaagacgttggttctctggtgcgcaaagatgaggccttttgcgccgcccttggcgatgccgattgctgcagtgccgaacgctgggttcggcgacgaggtggctgcagcctccaaaggcacgtagcacaggacgattttgccagtgacgttgacagtcgctagtgactcctcatcgcagctgcgtgtcaatggcattggtctcagcatcaatcactagctcaagatttatttattttattaagtgtagaagaattcgtatcactttctcatgaccatttcgttcaattacctggacccaaagacaagcatatgatagttgctgttgttctttgttgcgttgaagttgagagattgtccctggaattaagacgatggacgttcaaaaatttatcacatttaaactgtaaagcagtgcagatgtcttttgcaaacagaaaaaaaaaagaaaaaaaaggtcgatcatcacgatgcataccaccagcttctctttgttgccgagcgagaccacggtggggaatgagcgatctatggtggtggcagccaccgtgatgacccacggcacgacgttctccaccgtctgcggcgcagggccggcgttcccgccggcaaacaccacggtcatcccgctcgccacggcgtgcagcgtcccggggatgtcgctaccaatccccaacgacaaggacagcacgtccacgccatcgttgatggcgtcgtcgacggcggcgaggaccgcggcggcgctgcacgtaccggcggtgccccagcacgccttgtagaccgccaggcgcgcgcgcggcgccccgccacgggccacgccggcggccaggccgctccggtggtggctcgcgttccaaacctgcttgccggcgatcgtcgaggcggtgtgcgtgccgtgcccgtttaggtcccttggtgacatgtagtcgcccttaagagactcgtccgggacgccgctggagtaccagcgcgcaccgatgatcttccggttgcaacccgtggtgttgaacgccacgccggtctggcacttgcccttccaccgtgctggcacagggccgtagctattgtcgtcgaagctttgtgattcaggccatatccctatacaacacgtttcattaaagataaatttttcaaattttatatattttttagataatgaaaagattcctggcctttgcttaaaaaagctacagccacttattatataattcactgaatggagagcataaaaaacatcaaagatctggacaataactaataataccaacacaaaatagagaaacatttgagtgaggatggtagaatgtaagtcattttcaacctgtatcaacaccaacgatgacatcttcaccatagcctgccttcttcaaaagacttgattgttcgttgtagttaaggccaagaaaatcccagctccgtgtagtgtgtgtttcatggtaagtgttaggcttcacagtgataactccgggtaattctgcaccagaaactcattagttcattaatatcatgcaagaagcaagacaacaagctcatgttatagggtttttttttagaactaggaaggtagcccgcgcatcgcgcgggcatgcactataaattatgtttgaaaaaaatatataagatggcagaatatcagccagatgacacttgtcatttcataagtactgtttatccataacttatctcatcagtgttgcttagataatttttccaatctatttgttagcttttaaaatacataatatttaatacattcatataaacaattatctatgatctcttcgttatctagaaaggagttagatttaatttgtttggaaacatgtgatgttttgtcttgtttaataaaatgtttagggtctttcttttttttagcaaatcctaaataactattattgaaaatgaatatattttattttttaatgaatatattttattgacgcaatttgttatatatttatatataaatttctaaagatatatcgtagatctcccttccctaatatatgtgtgatctatagtatctttctttttttaaaaaaaagaaaatacctagtcaatatgagtctgaacattttagtaattacaaatgtaacttctcaaccaactataaaccgcaaacattgtgtggcttatatatatacaataatgtgcagaggaactcataatgtcatgaaagtcaataatatctaagcacttaaaaaataggaacatgtataattgttctaattttagtgaaaaattaagtttaaaatataggcgttatggatctttaaattgttggtttaattataaatagagcaatttatattagaatcagatgtgtggctcaaaagatatgtatgctttaatattattgattatttctctttttattggttataaaaatatcaaggagggtataggggaaagtgcgagccgggggatgaggggacgggtagtgttgtgtttgtgcatatgtgaggagggggtaaagtttggggggtgggggcggggtttatttcctagtttttataaatgatttaaataaaaaccgatgatttattgttttgttcctaaaatttcgaataatattttttaattattaaaatgtaacacctagcggcttaagattttttttaaaaaaatagatctaatggtttaaaataatggatatacatatttaattcataaccggtggtcaaatgtgtttttctataatttctaagattttgtttttaatttaagacataacacgtgacatgtaagtgctctattgagaatgtacgatgatttaaggtgatatagtttgtttgattttttttatttggttgacacgcataggtgtctacaaatgacgtattatttacagtgaaattgggtaatatagatcttgaattatttagaagatgttttaaagaacattgattggatatttatcatatatagatcttaattttactaaatatatttatatttgtgaagtaatatattttacttttatattgttgaacttaaaaaccatatataacttaagaattataatcatttagctttctaattattttttgtttttatattaagttgctaattagttaaaaattagaagaatgaagaattgaatgagagaggagaggaggaggagagagtacgtatgtagttaattagttactattgccttattgtatcataattgatccaccgatttgaataaaaaattagacttgatattgaaggaaattcttagggtttccttcaattttggggaggactcatgaaaatgatacgtgcatgtgataaattgaaaaagaccaacatgtaataattctttaccaccaaaatatagctaactaatatgagtcttaaaccgttgatttgattaaaaaacagtagttcaagtgtataataaactgaatgtgtagttcaagtgtatcactgtgatcactcctataatttaggtagcatgcatggtgcacagcgagctcctgcaggctccatatctctaacttattgtaacaaattatgctttgtagcttaacaaccttggagaaaaaaggggagatggagaggagtagatgcgtacctagctatctacgtcttgcgtgcggggaggaggtacgcggcgttcggagatgagaggatacggattagcttaaatctaatggctcaaaataatgggtccacctattttaagtgaaaatcaatggttcgaattttctctatttattataatgccacgtggcgatttaggagcgttttaaggaagccacatggcgatttgagagtgtttttagaaagtttcatggacttttagtatataatagatagatagatagatagatagatagatagatagatagatagatagatagatagataatagatgtcataggggttgatgattacttgcaagttcatcagcttgggactcggtgagcattgcggcgaatccagagaatccgtgcttgtaactgtagactatggatttcatggcttcatctttactgttccattgaaaacaagtcacaaaattaacccgagtttccgactttccgtataaaaaagaagaattaacccgagttccttttcatgtcaaagatgcagaattcactacgtgaaccactaatacctcccaaaaactgaagtaagagcatcatggtgcgatgcagtcaccacagatggatcatcgtgcttcttctcccccatgtagacgatgtagagctgaaaattaaatcaatgaaaaacaagtttccaagaatcaatatcagtaatttccgtgcaacaaagaacgaaatcgcgtctccctgaaaggggaagcggcttactctgctagacgcattggcgaaaacagggagcaccagtagaagaacaaagagcagagtagaagggaaaggcgatctcgaatccatgtttgatttcgaggagtgtattcttgtggtttggtgttgatcttctgctcagccgttcaggtataaatagcagctagcatccaacattaaccatgggtgtgcaagaacagttttttttcaaacagagcatcaccatgttgacgcgttgattgttttgtcaagtcacacgtaacaaaagggactacagtactagttaataaaccaggttcacgctgtacggtgagcactgtgatttgatttgttcatcgtgttcaaattaatagcgacatacctaagaggatatatataatgatgttttttttttcacatgtaatgaccggatcaactttgtgtgacgacgaaagcagataacgtcatagtggctccgatgaagcttctgctgcacctggctgtaaaaaagcgaagctgatggcttaaaaattatggcttattcttgccgcggaggttaattaagcacggggattttacttgttcttggtaaacctttccaaaactgtgagccgttccttcgagtagtgataaaacaagtcaaccccagggaaatgcttatgtttaacaaatcccagagtcaaacttgctgaactcccacacccaccgaaactagtttttcctctgcttaattagtatcatcacaactgccatagccatctcttttccttcatatgagtattggcttggaaatatgcaatccattgtgaaatttacatggaactgcttggtaaattcattttgggctatctataaacccttcaaatttcctatgtaattatttattcaatttatgtaacatgtatgtagttaatagaaaaaaaaagtttggcgtgttggctacctgcatgggagcgtatcctatgcacacaggccctcgcgtgtacacaccgtgtacaccaactaaaaattatcacaaaaaattctagaaaaattcatacatgtactttcaatagtattacatctacgtgcaaagccgcatcttcaaattcattctacatagagaataacaaaaaagataaaattctgacaaaattgcaacctttaaactgtcagattttttgtttttttttgttacggctaaaatataatgaatttgacgttaagattttaaccctaggtgtaagacaattgaaagtatgtgtttgattttttctagattttttggtgatattttttagttggtgtgcacgtgtgtacacgtgagggcctgtgtgcataggatatgttgcctacatgcacaagcccttgttgctgaggtaacgatatatatatatatctctctctgcgtcatgcactagtatttttttttcggaaccactaaacttctgtttgatagaaaatccattcctaaatcttgcacattttggcccactacatgtgctccgcgattcgtactcgaggtgcttcttctctaactcaggcaacctcctcttcttttccggcgccggcaacaacccaaactctaacggaggtccgatgtattagggtcttagggtggggttggggtgggaggggaaggggagaaaggagaggtcgccgggcttagagatggtggcctagcggtggaaggtggaatgggcggactggtggcagcaccagagccatggggatggaggagggagatggacggtgttcgtgatgagggcatagcgaatttgtgattacgaggtggtggcgtgtggtggtggatccagccacaaggacacgccggtgacgaggaagatggctaggcggagcatcttgccgccgatggcttgagaagggaggagactgtagcgcccgttccgttgtggcgcctagcgggaaaattatctccgaaaaaccctaattgcgaaatttgtttctttgcttgttgtctagtgtccgtgccatctcaagatctcaatccccgatctatcgtcgagttcaattccgaatccaattccttccaaatcaaatccctccgcaaaagtctagtttgcttccccgggttcgatgggccgaattccgctcggcccatctcttccccggccctctctctcccgggcgctctctctctctctcgctccctccccgccccgtcgcgtttcccccccccgctcgctgctcgcgtgtgcgcgagccgcgtcgagcgcctctctctccgcgccccctcctctcgcgcgagctcccctctcgcaaagccagccccgcgcgccgttgctcgcgcgcgcgcccgcgtggttttccgcccgagccgtgtcgtctgcgcctcccgttgcttcccgcgcgcgcgtgccgagtggccgaccgcccggtcgccgccgccgtcaccctctgccgcgccagcccgcgcctgtcgcccgtgtcgtcgcgccgctccaaaccatcccaccgtcatcgccgtcgtcatcacccggcccccgccactccgcgcgcaagccgccaagaggcgaaggccgagctctcctttccctctgccgcgtcgccccgctccctcctccttttcccgattcggcaaaggggcgagccccctttctctccctccttttcccctttcctccctttttcccctctcgccggcgtcacctcctgtcgccgctttggacgctagccggagcgccagctcgccggcttgaccgcccatgtcggttcctctctcccaaaccgacatttccgcccatttaaacccgtcttccccctcccttccttccctctcccattcgcctcctcaccgttgccgccgcttccgtgctctgcctcgcctccgccgtccatcgccaagcgctgggagaaccggtgcgttcgtggacgcggaaggggactccgggcgcgccctcttcttcctcttcctcggcccgaggccggtgagatcactcccgcgctgtcggcttctcgtcacagcgccccgtcccgcacggtagtgtctctctccgttcctcctcctcgctccatctcctccccttagatttcggtagtagctcgagtaacctccccatagttagccggcgccgccccgaccgtagccgtcgctcgccgtgtgctcgccgccgtcgccgctcgagctcggaagcgccgctcggcgtagctccgcccaatccgacgctagcatcgagttcccgaagccgcgtagatgctctcaccgccgggaattagcccctcgtagcttcgtcgccgttttccccttctcccgccgccggttgccgccgccgcaatccgccgccgtcgagcaacccccggcaaatccgagccgttggctcgcctccccttttcccgtgcaaccgcccggtgtgctcgctgttgcccgtatcaccgtggttcgctccgccgctcgccgccgccgcccgccgtccattcgcggccgggtcgtcgtctacctcccgccggcccgcgtggcagccacgtaggcgccacgtcggcgccagctcagccagaccgggtcgggccgaccccggtcggtccctccgcgtgcgcgcgatccaccgcgagccgtgaggctgcgcgtgggccgccgcacctgcgtccaccgcggaccgcgcgcatgcaccgcgtcccttccccgcccgcgcgcgtgcgtcgcgtgctccctccgcacggtgagccgagccgctgacaagcgggtcccacccaggaccacgcgtggtgagcccgatccaccggctccctctctctcatccctcccgcgcgcgcgcgtcttgggccgctttgggccgccttcttggaccggccggcccgttaagctcggtcgagccgccccaaatctattgggccgcgccctagccgcccgagaaaagtctatattccctccctcctttcttttccttttcttttccaaaaaggatttaattaaatcctttttccgttagaccaaaaatccaataatcttagaaattcaatatcttcccaaccgtaaatccgtttggctccgttcaacttccaaaattcctcaaatctcgagatctatctaatggcacgcttagaggtcattaatagggctttatttccgccgtttgttgagttgtcccgttttgcgtgtagtttcggagcccgaagacccgcagtgcgaggatttcgaggatcaagctccagatctcgagcaaggcaagccacctttgaacatcttgagcctatatttgaaatttaattatattgcttgcaaaatattatgcattgatagggtcgcacttaatctgtttgtcccgtctgcaaggcagattggcggatctacctaatttgtcgcatttgatccttcctttgttaattgctataccatgtccccttgtaaccacccagttgcgcctcgatactcgtacactctgtgcaagtatcgacggtcgccttcaaacttaaaatctgagtaacaacttgggtaaaactggagttttacaaaagacttggaaaacccgacacctgggtcggtgcctgcgaactaaatgaacttccaaaaccgcggaccggggaacgtaccgggtgtacggtttcccgctcttgcacttaaggaccgtttccttggaatttcatccgaacataagaccagtacgaccacatgggtggaatgggacacccctggctgagtaactagcttatcaggggagccttgatgccgagagacatgtggattcgccggggtggtgtcggggaggacccctgggcttcctggcacagtatggtctgggacctaacctgttgttggtctgggacccctctcgtcggcatatggtaaacctgtatcggctttcgaaatgccttgtcatgaaagcttggaggtctcccgacgtggctgatccccacgggctgggtgatccgggttagtaatgtcgtgtgggtaaagtgtaccccctctgcagaggttaacaaactgttcgaacagccgtgcccacggtcatgggcggatgtgaggtgattcctagcgtagttttgtttgactactgcttgtgaaattgctgttgtgaaaaggggttcgatgtttgaaaaatctgcagctgatgggatcagctaggcccgggtggccgtttgaaaagttgttggcccgggtggccgtttgaaaagctgttggccgggtgccaaccttgctgcaatcctaaagactgatgcattgcacatactccgaccggacgagacgcactgtctcatccgtgtcgtttgagaagcactcacccagttgttttagaaaaagagttcaaataaaatcaattacaaaaacaacagcctttccttgaagcctgcattaaacacttatttcccctggcttgctgagtactcccatactcacccttgctctatataaatatccccccagttgctgacgaagatgaagcggatcctgctgatgaggagttcttccaggagcaagctggttacgatgagttttagcgtttcggcctggttcccaagtcgcgcctgtgatgattggtccaagtcctggcttccgctttccttttataatgcagttgtgagctcgggatctgtccgcagcccaacatgactgtacttctactctataataaagagacctctgttgctgtgatattctgtctccctgtgataccagcactgtttcctgggactggtatcgattaacaggtcaatttggagcgtcgcgggctagttccggtcggtactagttcgaggcgtgacagagacggggaaggggaggggcggatagccggccgctgagggggaggggagggaatctcgccggcgccgttcacccatttcgcccagctggtgaggccgggcagtgccacatggggcataggaggtggcggaagtggcctcgtcggcatggatcaggtgctcgtgacagggcaacggtgtgaggggatgtcgggaggaggaggaggaggagaaaggaaggggattttagggttagtttgcctagcactaatcttaatgcaatcggaaagtccaaaattcgcacaattttaagagatgttttctatcaaatgacatatggacactccctatttttttccctcaccccacacggcacaaatctccatgcaaactaaccgtgaacaagttagaagtttttgggaaaaaaaacatgcagaagaaattttaaaaatccattcattttcgatacaagctcattataatttggactcgacaatgtggttttcttttttgcgggggaaggagtttgttgcatttgtggtttcttttatgaaaaacaatacaaatccaattgatcacaatacgcgcacactcacccttatgaacacatacaccacacccgatccctacgagcatctccggaagactggatcggtatatcttgaaattagcgaagtcaccatgggtatctcgttgttgacgggtacacccctatgagcacttcggaagattgggtcggcatatcttgatattaacaaagtcactatgggtgcctcgttgtcaatgggtacatcgcctgtcactgaaataataatttgccgtaaatacgagcacccgtgtctagtctaagacttgaatctagttggactggttccagcacaagatcagatcaacagatcaatacaccaggtaggtacaatcgaccaaaaactgtagagtattatctctcatcgagagggtctgaacatgtctaaacatttgtcgccatgcatcctttgcttttagatctcgtacgtagtccccatttattattgctgatacatacaccgacagtctataaaaggtttagaaaatttcatccatgattcatgactatctgttcaagagcaattttacggtccttgaggaggtaccatgaggtaccaaaattttattgtaaaatttagtacctcctagtacttaggtaccaagaggtaccaaatttacaatagattaagaactataaaattgctcatatgttcaaaaaggacaaccacagctagattattttttagatagtggatttttcattaatccggcctttatatctacaaaggatatacacagccaaaatattacatgagttcttactctaaatctcacacagaaaaacacacacaaacacaaaaaataaaagctagaagacttagcttcaaccttcttcaaggacttaatctatccaaccaagtgcgagtagggggaagaggagaaacagaactagtccatgctacccgtcgccgcaccatctctgtctctacataactcaaccaccatatgctgccaactgctatacctgctctcctctgttgccgtccaaaaccccttacgtcgatgccacatttcgaacgcccatattgcaccatgaaaccgccttgccgcgctaccaccgtcttccgcacaccattgaactcacgcagctcctagagtaccattgagccatctagcatgacatgcaccttgcctttactgccatcagcttgccggagatgctccattactattcacacatatccgcaagcagaccttgacactgacgccacgtggcagttgctgtctctaggacgctgccgccaagagcctccgttgccatcatccttatctgcatcaagcatgtcgacgaccatcgcaccattagctcaagcgagcacagaacggggcgtcggagctcgccaaatcgccgctgtccctaggacgctgccatcgaaaaccttcgttgccgtcgtcacaaacagtcgtggccaaaccacaaccatcgaccaccaacgccatgctggccgccagtggcagagtaaggggtggaggactagcctctgtcaccttccaacgccaccaccgcccaccaagcacgaccgacgcctcctgtacgttctagccacctcagcaaccacgaccgcacatcaccggagtgccacctccactatcagctgcctcagcaccaccagcgccctcaccaccatcgcgccggcagaccaccaacgggcacttgccgcaaccaccatcggcgcttctaccaccgcgctattcgccagagcttcaccgccaccgcctagccggccaccagggcgtccccgccaccgggcaccgccgccacctcccggcgcaaacaggccccgccgccaccaccatcggcgccgccaccatagcgacgttcgccagatcgaaaatagacccatagcgccaccccaaccctaggaagaatagaggaggaagcctcgccgccgccatcccagctggcccgcacaccggcgacccgctccggcggcggcgaggttgaaaagcacggcggtagttagggtttactaggggagaggaaaagtcgggtttatataaccatggacaaagaaatgcaataccaatttgaacttcagtcttacaattctagtattgcaccagattgacatggatcacattgacttctgtaaaaaaatgtacaacccaactttgcatgaagatatttactatctctagctaaaagtttatgaagtatcagcaacaaagtcctggattatggtgcgaactgcaatcggaattctcacagagtgtgtgttaccatctagccatgtcaaactcccaaacgtgtagccaccttgtactctctgtgttgttgtgaatgtcaccttaaatgttacacttctactaccacccctagtgaatgtgatcaccgaaggttccactgacatagtcataccaaccggtgcctcaagcgctgcatggtaagttgcttctgcttctccaacattggtgacagtccgccaaaccgtgacagagtcctttaggtttggcactgcaattgacgggaggttgagctgatagatttgctccatgtaggactcgcagtcatcctcagcttcaggaagggtgcagttgaagaacttagtgtagtggcttggatcaatgtcatatactaggccagggtcaatggctttattcggttcgatgtggccaccaccgaagtcgaatgggtcagccactttccttggcactgcctcagcttggattggcatgccaaaacgatctgtcaccgaagctgcaatcaagagagatgtatactggttagtcctaactaagctaaaagcaacgaattattggaaacagattaatctaagtaccagtagtgacgatggcggacttgatcatggcaggcgaccagtccgggtgaaccatcttgagcaacgccaccactgctgatacatgcgggcacgccatggacgtcccagacttgagctcgtacgaatcacccacagctgcgaggatactgactcccggcgcagcaatatcaggctgttgaaccgacaaacaggttagttttgagacgttcaaaaaacctgacgccatcgtcacaactacacagtaatataaggtattttcattgtttgtagaacatcaaagatcaacatgtcaccttcagtattccgggaaacaaggagctcggtcctcttgacgagaatgcagcgatccttggtgagagcaccccactcccgaccaccgtcatggccgacgacaccttcaccatgggcgtgctgaaaaatgagagaagaaacatcaaaagatcattcatgtacagtactcaagctggttttgcgtattggagagtagatgttaatgggatggtatcaagagttcgagctcaccttgtgctggtcatgtatgactcgatcctgcgtgtgatctcgtagtccaccagtacacatggcacgctggcgcggctgcaggcattcagaaaatcaagggcgttgctgacggagtactgcacgaagatgaggccattggcgcctgccttgatgacacggccgatgatgtcgcccagcgacagccgaggtggcatcagcgacggcggcgagcacagcacgaccttgctggtgatgttgatcgacgccaacgtctgcgtgtcgcagctgcacacggcaatccattcataatcaggatctaaagaaagcagagtgatcgatctatcaaatgtgatgactaatgatactagcttagcatgatcaaggttgttaaattaaatctcgattctgccataccattttgcgcactttaccatcctaattaagaggtatgattctatgattttatacaggtagaatttacgatttttatgtattcgattccgattcaggatcatgattttaacaaacttgaacatgatcactattggttttgttaccttgatccatcaacaagcatttgaaatttggtgctgcttgctgttgcattgtagtaaagagattgcccctgcaagcaaatatatacaaaggttaaataacccacatcaagctataggagtacatcagtgtagctgtgcagtaaaacattcatagtccatatagcaatcgtcatgcaattcatagtccatataacttgcaagttattgacgaaatagcatggttacttaattaccacaaatttcttgttgttcccgagcgatatcaccgtggggaaggccctgtcgatcgtggaggcggccaccgtgatgacccacggcacggtgttcctcacgatctgcggcgtggggccgtcgttcccgccaccgaacacgacggggatccctctcgccacggcgtggagcgtctcgtaatgctcgcccgcgcctcctatcgacagggacagcacatccacgccgtcgttcatggcgtcgtcgatggcggcgaggatcgcggctccgccacactgggcgcgcaggccccagcacaccttgtagaccgcgacccgcgcgcgcggcgccccaccgcgcgccgtgccggcagccagggcgccgccctgtctgtggctcacgttccgtacctgcccgccgacgatcgtcgaggcgacgtgcgtgccgtggccgccgaggtccctcgccgacatgtactcgcccttcaggttctcgtcgggaatgccgcccgagtaccatcgtacgccgatgatcttcctgttgcaacccgtggtggcgttgaacgccgcgccggtctggcacttgcccttccatcgtgctggcacgggactgtagccattgtcatcgaagcttcgtgattcgggccatatacctgttacgtttcgtcaaagctttaactactggaattctacttatattaatgcaagtgattttggtttagaatatatatatatatagcgtattgtactgtagttttatatacctgaatcgatgacaccgacaatgacatcttcaccgttctttgctttctttagaagacctgattgttcgttgtagttaaggccgagaaaatcccagcttcgagtcgtttgtgcttgatggtaagtgttaggcttcacgctgatgacttcaggtaatcctgcaccaggaattcataattaagtttgttaattaataatcatgcaagcaaatagtagcactgacacaacatgctagtgccaatattataatttgtagctttgatgattactaacttgcaagttcctcagcttgggattcggtgagcatcgctgcaaatccagagaacccatgtttgtaactgtacactatagacttcatggcgccatccttactgttatgttgcatatattgacaaaaaaaccacaaaattaaacatgagcaaccagttctatcgcttgccgtgctcggtaaaatttataagaagttaggacttgaactccttgtacctcccaagaacagaagtaagcgtgtcatgatgcgatgccgtgacaacagacggatcatcatgcttcttctcccccatgtacacgatgtagagctgaaatttcgatgtaaaaggtttcatgaatcagtatcagtaactttcctgaggaaaaatctaggcaaattaaattacatttttcctgaaagaaggaagcatcttactctgctcgatgcattggtgaaaaagggggaaactagcagaacaagtagtagcaaagctgatctcgaatccatgttgaatttcaagaagtttgttcttgtggttttgtgttcggtgatctagctagtatgcatgtataaatagcagcccggccgccaacaaccattcgggtgcaagaatagttttaaagaaacatccttctgatgtttgcaaaaagactaaatccagtccacattgtatgacagtacgcgtttaagtaccaaaaagactaaatccagcatacattaattgtatgagagtacgcgtttaagtaacaaattaaaagactaaatcaagtccacatctgatttgttcacatgcttaaacatacttacggaaaatgatgtaatgacccagtcaacgttgtgcggaaatgaagatagagtaaagtccatcaccggtttctaaacttgtgccgttgtgtcatcccagtctctaaactcgcaaatcgatcattcaggtcttcaaacttgttttactgtgtcatcccggtccctaaacttgcagatcactcgtttaggtcctccaacttgttcagttatgtcaccccggtttttaaacttggatttgaatatcatctgggtcaaataggacggtctaaaaactttatatttaaaaataattcataacattttcatgtgaactttaatggagacaaactttatatcaaacttgtagccctcgacgcgatctacaatagttgtagttgattttttttattttaaatcattttttcccaaaatgtaattttaaaattaaaatttcaaaatctataaacatgcaacaatattttgggaccctaaacagttttaattcaaaaacttttcaactacaaagttgtaggtcgcgtcgagggctaaaattttgatataaagtttgtgttcattagagttcacatgaaaaagttatgaattattttttgatataaagtttttagaccgtcctgtttagggaccggggtgacacaactgaacaagttggatgatctaaacgtatgatctgcaagtttagagatcgggatgacatagtcaaacaagtttgagaacctgaacggtcgatttgcaagtttagggaccggtgatggactttactcatgaagatattttaaatcctttgctcaaacatatataataaggttaattggatcataccatttcaatttgcgtatacagaaaaatatcattacaattcgtctattcatagccatgtcattaaaattttacaaaattaaaaccatgccattatcgtcacattttccatccatttactttattttccgttttcttccttctttctcccatctcggcttcttccacaaccacagtgtgaacttctcatttatcaccaccatggatcaccctgaccgtatccccacgaccgcgcgcttctcactgtggttcgacggggacggcgacttccggtgcaggatattcgcctatcgtgacggccggcctcatcctcgtcctcgacttccggtggcattgcgtgttctaggatggcatcgccgtaacgagcaccagtcaccggtggatggcagggcggcgcagcagcacccgtcggggttgccgaggccgccgggggtggcggcaggcaggttcgcgggggggctgatgaagctagcgtcaggggtgaggcaatccatgtcgagggtgtcgatgacggtgccggaggggtggccggccggcgtgggcatccgtctaaatctcccaaaattagttaatccattcgatttgctatttccgttctcaaatccactcgacctcctctttccctttttttttccaaaaaatcaaatctctcaaattcactcgatctactctttccgatttttccaaaaatcgagtctcaatccactcgatagccagcgctagctagggtatgtctcggcggtggcggggtgtacgtgtgatggatcggacgagataaaaaaaaggcgaaatacgagaaaaacagaagaaaaataaaccgatagcgtttgataagaaaacagcgaaaaaaggataaaaaaaataccggaagctatatgggctctagtttactcgccgccgatgcggacccaacgctgatgttgaaaaaaagaatgatcaataggaactcaatcggatagaaccagcgtgaccaggacaggtaaaaattgtagataaaaccgatttaaatacggatagacctgatagttgctagttgctataaattgaacacgaaagtgtcgccgataaagataaccagcatggtggcccgcgcagattgcgtggctagcatcattatattttctctcatataatagcatatatgttttctcattatattattcaaatatattaaaatgacaacataattttaaattttgcaataactttgcaaaactactaatgtgtaatattcatattgtattttatatacctgttagttattaattatttttaatatcaaattttagttatttgtaaattatatttattcttatatggactctagactcgtcttttaatatttcttttttttaattccgaattttctgtaaattgtatttctatatagactttatgttcttcttccaatattatttatttttatttctgattttttattatttctaattgtatttctatgtggactctaaacttatctttcaatattctttaatttttaatttcaaaattcagttatttgtaaattgtattcctatgttgactttaaactcttcttcccatgtttttcttaattttaaattttagttatttgtaaattgtattttatacggactctaacctctacttttaattttattatgtttattccaaattttagttagttttaaattcctatatggactctatactctacttctaatattccttttttttaattccgaaatttcagttagttcctaattgtatttctatatggactctatactctacttctaatattccttatttttaatttcgaatttcagttatttcctaattatatttctatatggactctagtctcctcttctaatattccttattttttaattccgaaattcaactatttctaaattgtatttctatatggactctagtctcctcttctaatattccttattttttaattccgaatttcagctatttctaaattgtatttctatatggactctgtcttttctttttctccgattaatgtgagaatttttaggccatgagagtgaacgtagaggctcttttttttcctttaataatataatagatagattcccggtgtttttatttcccaaattccgtgatagctcaataccctctaatctaggtcatgtttttcttttaaaaaaacacagcaaagacgtagaatacgtgcacaatcatccctataaatacacatgctattgcaaatatttctgaaagactagagtgacatatcaaagtcatgtctataaatacacaccctatctctataagcatctctggaagactgggtttgcatatcttaaaattaacgaagtcaccgtgactgcctcgctattgatcgatagatacgtcacctatcattaaaagaataattagctattaatacagagcacccgtatcatcaagtctagaatttaaacccaaataaactagtttcaccgcgacaaacctaaccacttgatcgagttacgtccactttacctaatctaggtcatgcaatgcttgtagcgggagacgcgtaataagggcatgtacaatggtgtctaataacgggctctcttcgttgtcatgcaagtaaatttagtggcgtggaagaatgggaggaaatgaatgagaaacatcgttgctacgcatgataatggctcagagtctaataacatgctctcttcgttgtcatgcaagtaaatttagtggcgtggaagaatgagaggaaatgaatgagaaacatcgtcgctacgcatgataacggctcagagtcgactcttagcatttattcacgaaaagtttgttgtatgagggtgtaaaaaaggaaataagtataataaaaaatatttagtgcattaattatttagaaatattattgtctctactattgtaggaggatagtctctagtaatatttattaatatagagagcttatattagactctacctacatacatgccctaatacagttcagatctaatgatcgaatcaacttcaatgtgatggggaaggggatgatcagctagcgatatgtctatacaggaaacttctcagcatggatgtaaattaaagacgaggatgactggtagatggcaattaggaagaaatttctgggggacaagataacaggattgatggtgtaggcatagacagtggcgtagccagaattttctcaagtctagagttaacctagtactcctccctctatcacagtttaattaatcatcacataacatttttaaggtcttcccaaaataattaatcatcctctaacaattgcatctttgtttatttgtgccaagtatatcctctaacaattgcatctttatttatttgtgccaagaataagtgagcataattgaatgcactgcatgcaactaaccaagattaatttctattggtctaactacatgtaatatttaaaacttgatgtaatccttagaacacaaagcaacgtagcaccttaaccgatgataattaattatagaatgatgaatgttttattgtccttggtctccgcgctctttgcttagagcaagtttaatagtatagccaactactaactccatatcatttatagccaatgtaatagccaattcatacaatatttgcttactattgtataatattaatacctggtcccacctgttatactcacattatatcttggagtccgttctgcagctggctacagatctatagccccctgctcttctctcttcatttatctctttaaaatatgtttatagctgtcttatagcctgccattgtacatgctcttaggtgatgatcaaaatgaaatggagggagtataatttacataatttacctttatttcaggttttaaaatgtaaattttaatggatatttaggttcaggagtagggcattagccctggatgtcctatccctgtttccgctactgggcatagattctttagcggcaaaatttgctatgtaacactaaaaatagcaaatttcagtgtcagaaaaatcatttgttgctagaaaaaaatgtggcgtcaatactaaaattgtggcaatagatacatgttgccacagttttaaaatcgttgctagctgtggtaataaatagcgtagtaataggttattgtaacgatttttatttagtggtaataaatttagatattgccacggaatggatgtggcaaaaaatcatattgcaacacttcacatcgttgtaataaaaattattgccaccactccatatgtggcattagttctacataccaaattaaaaattcaaatattaatctatcatcctatctatttatatttatttctttataccgtgtcttggctaggattcgaacccaagacctatcattcacgcgtgctctcctttaccaactcacctacgcatcaattatgttggaatatgcatttcgttccatttgagcctaactaactgagatttgaatcgcagatttgaatatctaaaagatttcaaatgaaaaagttatcaactataaaattcgtcgagagctataatttccatataaaatttgtctcaatccgtgtccatatgaacaaaattaagttaaattatgagacaataatttttttattgcaacgaatttgtttaccgtgtcaacaaaaaatagtgaaaagtaccatgtattatgtatattgccaaaaaaaattaaaattgtggcgatagaacatgttttttgcaatagtaagattttttgtggcaatatcttattttctattgcagaaaaagtactaaataaaacaacgattgtagattgctacaataaaatacaattatttgccacagaaaaattatcattggaatagtacaatatattgctatgaattattttttgttgtaataatttggtggcaatagctctattatcttgtagtggcacttaaagaacgtgtatttgttacaggacaccacggaaacatggtaattagctgctagacactgaacacattattttattatatcttatccaaatggagagagaaactttcaaaaaagacaagtttgcccatagggcatgtctctttataacccaatcagttctagttcaaatcagatctacactaggagagtgagaatggactatatcgagagagtgagaatggactgggtctggtttgaaccaggctgagttatcatacaagtcgatggacacaagggcaaatttgtacttttcgctctatttctctctccatttgcactggatataataaaataatacgttcagtgtctagtaactaaataccatgttttcatggtgtcctacagcaaatacatgtttttttgggtgtcatgtagcaaagagcgtaaacttttaagtgtcctgtagcaaattttgccccctttagcacccactttgttttattccatggattggataagtaagtttcgtgtaagacctcagttttccaaggactccgggacatgtggattaaacatattaaggtctcctttggaacaaatgatatatgtacgaatttttaatatttatattctatcttttttctcataaatggccaattcagacaaagaatcacatgaaattcctttggaatagatctatacatggaaattttgtagcttgaggcttagcccattggaattttttttcattggaataatgtttcagataaattggcccatttaatgtttgatattaaagcaaatggatataatagaattgggctgaaaatatgctacatcatagatgggctaggctaaaatctagtcgggcttgccattgggctaagcccataaacagggtgctcaatacatgtttttaatgggccatcaaatattttatgatgttttttacgctagataatgacaaatatgagcgtcacaaaattatgacgacggaaggatcgccactagattaatgacgaaaaaaataaggtttcatcatagagcgccattagagactcatgataggtgacgaatgaattttcgtcacgcgagcatcacagattacaaaacgtgatgaaaaattcaatgtctgtaaagtaaatgaagcgtcatctatcattctatcataagatctcttgtagtgatttttcattagtcaaaatctatttcgtgcgcatatggactaaggaaccactgctctactacacaacactgaacctggcgtagctgattttagtggagcctttactttcatgcccgagagttgaatttgatactgaaatatgtcttgtgttcctcctcctttcttatattgatgcttatttatatgaaaatcaccctaaacaaaacatggttgtggtatcactggtggagaaaccatctttcgtcggtcggccgatttccacaatagtcccggatgcaataaaaaccagggctaaagatgatctttagtcccggttcaaaagggaaacgggcatatttgatctttagtcccggtttgtgttaccaaccgggactaaagatcatctttagtcccggttcgaatgctgtcaggacctgtcaggcccccccgggatctttagtcccggttggtaacatcaaccgggactaaagatcttaactttagtcccggttggtattaccaaccgggactaaagatcccggtgatctttagccccggttggtgttaccaaccgggactaaagatcttaactttagtcccggttggtaataccaaccgggactaatgatcccggtgatctttagccccggttggtgctaccaaccgggactaaagtcccacccctatatatatatgtcttcttcctcctccagctgcccgagcaagcttcaaaattacttcaaaaaagaggggaggtcatgccaaaatttctattgaatttattttggtgattacatacaaatcggaggtgcctaaaaggtttgcaacttcatcctccaatgtttttttttgtcatactacatttgcacctatgttttgcacacttttttttgtctccaaaatttagttgtaagttgatgagagagaaaatgtgtgtggggaagaaagaatatatagaaatttagttcatttgctaaacaaggttttataaaatagttgagaaggaaaactctagtgaaagttaatcttaaataatagaaaacaaactaaaatgaaaattaaaagaagtaaaacacattaaaattagtttaaaactttacaaatagtttttaagaattatttggtgtaatattttatgatttttgtatgaataaagatatcttataattattgtatgactgtcattattgtaagaataattatttgtgtgcggtttttttgactcatgtagatggatcggcaatggatgtacgctgaccggcggtccaaagagtttattgacggcgtgcactattttttgagagtggccgaagctaacaggcaaaggggttttatttgttgtccatgcaataagtgtaagaatcagaaggagtattctgcatccaggactattcatttccacttgtttgagtcggggttcatgccaagctataattgttggacatcccacggagagcaaggtgttgaaatggaagaagatgaagtggaagacgacaatattccggactttgctcagtatgttggatttgaaggaaatcaaacgggcgaggaggaaatagctgctgatggtaacgacgttgcggatgatcttggtcagatgttgcaggacgccagggaggactgcgaaagtgaaaaggaggcccataaattgaacaagatgttggaggaccacagaacttcgttgtacccaggttgcgagcaggggcacaaaaagttggataccactctggagttgttgcaatggaaggcaaaaaaatggggttagtgacaaggcatttggcgatttattgaaactcgtcaagaacattcttccgggggaaacaaattgcccgagacaacgtacgaggctaagaagatagtctgcccgttaggactggaagttcataagattcacgcatgtccgaacgattgtatcctatatcgcggtgaggagtatgagaacctagaagcatgccctgtttgcaaagcactacgatacaagattagacgggacgatccaggagaagttgacgggcagctaacaaagaagagaattcctgctaaggtgatgtggtatttccctataataccacggctaaggcgtttgttcaggaacaaggggaatgctagaatgttgcaatggcacgctgaagagcgtcaacaggacgggatgctgagacaccccgccgatggttcgcagtggcgaaacattgacagaaaatttaaagaatttgaaaaggacgcacgaaacatacggtttggtttgagtacggatggcataaatccttttggagagataagcagcggccatagcacttggcccgttacgatgtgtatctacaacctccccccctggctatgcatgaagaggaagtacataatgatgccgattattattcaaggccccaagcaacctggtaacgacatcgacgtgtacctaagaccacttgtcgaagatcttaaacagttgtggaagaaggaaggtgtccccgtgtgggacgaggacaaacaggaggagtttaacctacgagcgctgctgttcgtaaccatcaacgattggcctgcacttagcaacctatccggacagtccaacaaggggtacaaggcttgcactcactgtatggatgaaacagaaagtgcgtatcttaagcactgtaggaaggttgtatacatgggtcatcgtcgattccttgcagcaaaccacccggtacggaagaaaggcaagcacttcgaacataaggccgaccaccgtacgaagcctaaacatcgcagcgggaaaacagtgtttgctatggttaaagatcttaaagtagtgttcggaaaggggcctggaagccagcatatagagagcgaagatggtcacgcggcgatgtggaaaaagaactctatattttgggagttaccatattgggaattcttggacgtacgccacgcaatcgacgtgatgcacctcactaagaacctttgcgtaaaccttcttggcttcctaggtgtatacggaaagtcgaaagatacactggaagcacgtaatgatctgaagcatatggaacaacgcggcgaccttcacccggaaccaaaggagaaaggaagccattacttgagtccagccagctacactcttagcaaggcagagaaggaaagtatgtttgaatgcttggagagcataaaggtaccgtctggatactccacgaatatcaagcgaataataagcacgaaggagaagaagttcacaaacctaaagtctcatgactgtcacgtgttgatgacacaactgctaccagttgtaataaggggtatccttccagacaatgtccgggcaacaataacaaagctatgtgcattcattaacgcaatttcgcagaaggtcatcgatccggatagattagaagcccttcagaatgaagtggtgcaatgtctcgtcagttttgagttgatatttccaccttcatttttcaatataatgacgcatctgctttgtcaccttgtgaaagagatctgtattctcgggcctatgtacctacacaacatgtttcctttcgagaggtacatgggcgttctgaagaagtatgttcgtaaccgtgctcgtccagaggcaagtatcgccaagggttatggaacagaggaggtcatcgaattttgcatagaatttatcgaagaccttcgcccaatcggggtacctgaatcacgccatgaagggagactacggggaaagggaactctcgaaaggaaagcaataacgacggtagacaacaatttattccgtaaagcccatttcactgttctgcaacactcttcattggtagctccttacatcgaggagcacttggctctagttcgcgccaggaacatcggtaagtccgatgcatggattacacggcatcacattgatactttccccgcgtggctatgacaacatctcatgggtaacgactcgatcaaccaacaacttgccttcctggcgaggggaccgtctgggtcgatcgcgacattccagggatatgagatcaatgggtacacattctacacgagagcccaagacatgaagagtacgaaccaaaacagcgctgttcgtgtcgatgccatgggacacgatggaacaactgccacgtattacggtgccatcgaggacatatgggaacttgactatggtcctctcaaggttcctctgttccggtgccaatgggttaggttgactggtggaggcgtaatgattgatgacagtgggatgacaactgttgaccttaacaaggttggatactcggacgaaccttttgtccttaccaatgatgtaacgcaagtctttttcgtgaaggacatgtctagcaaaggaaagaagggcagagagcctgatgagcctaagcgtcaagtggttctcccaggcaaaagaaaaatcgttggagttgaggacaagactgacgaggattacgatcagttggatgggcaaccccctttcacggtgacgattgaccctagcatcctcctatcaaatgaagacaccccttactcacgcagcgatcacaaggagggaacaatagtgaggagaaagtacgtgccgtaattattgtgtacacgatgtaaactattttggatgtattgattatccatataaatcaattgatgtatggcatatgttaattacgcacgattattagaggtttcaacaagtttaaatcatgtatatgctagttatatgtgatacttacaatttttaaaagttttaaatcacacaggtggcaatttcatatgtatgttaattagagtttttaacatttaatttactagcattcatatgctaattataattgactagaggatttttaaaagttttaaatcacgcaagtggcaatttcatatgttaattagagtttttaacatttaatttactatcattcatatgctaattataattgactggagaatttttaaaagtattaaatttaatatatttttaaaactatcattcatatattagagtttttcacaatttaatttactatctttcatatgctacttatatatgactattcgaatttttaaaaggttaaaatcatgcatgtggcatttacatatgttaattagagtttttagcatttaatttaatataattcctacgctaagtacatatgatgattacaatttttattaattttaaatcatgcagtatgtacatacatatcttaattagagtttttaccaatataataatatcattcatatatatgctaagtatatatgattattggattttttattaattatatttgcttattacgatttatccacttaatttattacagccaaaaataatttttcgaagtgattgtcattaatctttgtactttaaataatgttaatgcattaacttctattttataaacacatatgtaagcgaaaatcatatgcagtgctataatctttagtcccggttcttaaccctaaccgggtttaaaaagaatttcgaaatagcgggaaaagatatttactcccagttgttgagaacaaccgggactaaagatatctttagtcccggttgttgagaacaaccggaagtaaatatcttttctttactcccggttgttctcaacaaccgggactaaagatatcaagatatctttagtcccggttgttctcaacaaccgggagtaaagatcttttctttactcccggttgttctcaacaaccgggaataaagatatctttagtcccggttgttgagaacaaccgggagtaaagatccaggggtatatatattcccggtgcgccctcgtcttcttcaccaacacttaaacgttttcggccgatcgatctctctcggcctctctccttcgccgccactgcctagggcaaatccccgcgccgacgccgccgtatctcgccgtcgtctcgagctcgtcgtcctcgccgccgcctccgcctcctccgctgccgccgcatctctggggtgagagccgccgccgccagatctcccttcatgcatctctatctctccgatctcgatctctctccgtcgcgccgcccgccacgagacgccgcgccacgacgaggacgcgccacgccgccgccttcgacgccgcgcaacgccgccgccgcatgccaacgccacgccgccgccgccgtcgccacgccaccgccgccttcgccgccgcgcgcgcaatgccgccgccgccacgccacgccgccgccgccacgccacgccacgccaccgccgccacgccacgccgccgccgccacggccccacaacgccacgccgccgccgccgtcgccacgccgccgcgccaaccgccgccccgatgccgccacaccgccgttaacgaacgagaacgagaacgatcgaacgaacgagagcgagaacgaacacgtcaacgtacgttgccgcgacaacgtgaacgagaacgagaacgatcgaacgaacgagagcgagaacgagaacgatcgaatgaagacaagcgagaacgagggaacgaacgtgaatgagaacaagcgaacgaacgtgaatgagaacgagcgaacgaacatgaacgagctagggaacgtgaacgagcgaacgaacgaggacgaacgttaacgtgaaatgcaatatatatatatatatgtatatatatatgtatatatgtatatatgtatatatatatatatatatatatatatatatatatatatatatgttacttcgcatttatcctaatacatttttttgtatcttgcagaaaagacgtgttgtcggagtcgtccgtcaagcctgagtggaagagctagccctagaaggaattggagcaggcaagtgacgtaataatataaatgattgttatatttgtaatgcaattaattaagattattagacctgtaattagacttatcatataagattgtgtagtgttctaatattatttgagttttaatataagattattttattgcaaattagacttagtatgacattattgactacggaattggtgcgactcctagcaattgactattgtagtcttaattagacttagcatatacgcacgaaacacttagcatacattactattttagtcttagcatgtaatattatttgagttttaatataatattactttatttgtaattagacttggtatgtaattattgactacggaattggtgcgacaagtagcaattgactattgtagtcttaattagacttagcatatacgcacgaaacacttagcatatacatgactattttagtcttagcatgtaatattatttgagttttaatataagattattttatttgtaattagatttagtatataattatttactagctagggttgtataatatacgtcacctagacttagcttatatcacgatttgtaattagacttagcacgtaaggttgtgtagggttctaatgtacgacatttacacttagcatacatgacttagattgttaaaacataaatgtctcgtgacttagcatatacgcacgaaacacttagcatatacatgactattttattcttaacatgtaatattatttgagttttaatataagattattttatttgtaattagatttagtatataattatttactagctagggttgtataatatacgtcacctagacttagcttatatcacgatttgtaattagacttagcacgtaaggttgtgtagggttctaatgtacgacatttacacttagcatacatgacttagattgttaaaacataaatgtctcgtgacttagcagatgtttcttgtatcaacagatggctgaccgcgatgaggaacagatattgtacgatacaatcgcggagggaagcagccagtactggaatgaagaagaggggaacgaggatccaaaccagtacttgaacgaggaagggaacgtggagagggatgcggaggggaaccagcaggggcacgtggaaagggatgtggaggggaaccaggaggaggaggctagtggtagtcaaccctccgttggacagaagagggcacgcgggcaacgaggtgcagcgaagaagcttgagggtcggcacatcataacggaagtggaagaagatggacgtcctagtgccccggccgaagccgccaagaactatgtacgtcacagcggttgggttgtgcgggataacgtgcctgtcagtacggtgtactggcgaagaacaagggcacgcggagatcatgagagctttgtcccagattcagagaaagagatgctgtggaccacaatgctcgagacattcacccttcctgcgggtacagaggacaaagtgaaaaggtggactctgaagaaaatggcagaacagtttcagagcttcaagggagatctgtaccagaagtatatactgaaggggcagacaccgaacttcgacacattcccaaagctaagggatcactgggacgagttcgttgcatataagacaggtgaacaagggcaggcgatgatggaaagaaacaaagaaaatgccgccaagaagaagtaccatcaccacttggggtcaggaggctatagcgtcgcgatgccgaagtgggagcagatggaggctagcttgattgagaggggtatcgaaccggcaacagccaattggccggaacgatcgaagttctggtactatgctcacggtggaacgctcaacccagctgatggctcactggtcttcggctatcagatacaagaggctgcgcgacgactaacagatgcagtggaagcctcctctcagggcacgttctgaccagacagagatagggacgagctgacactcgccctgcagactccagagcatccaggacgaactcgagggaaaggggtgattccttggaagattggtttcaaggaggacatccacacgtacaggagtcggatgaggagcaagagagataccgaggcgaagattgcagacctagagttccgggtatcgagctacgaactcaacatgcaagaggaggtggcaaggaaggttgatgaacgcatggccgcacatcggtcccatgatccccagccgaccattcctcctgcaatggtgagcccgtcaggaaaccgtagtagctgcgcctcaacggggcaggtaggatcacagagcatggacgccatgcaaacacaggacgaatcgacctgtcccgttgatgacatcactcagcggacaccatgtgagctgcatattcctttcaagaacttatcaataaaggtaagatttagccattccgctagttgctgcttatatatgttgattactaataaataatctctcacaacatgaaggtggcgtcgggcatggccatcccaacggacccttcaggtacttaccactgcaggccgattccagcaggatactccaaggtcgaagttgagttggtcgaaggcgcgtacgaggacctcgagctggattaccctggaggagacggtgagacgcatctacgagacacatgccatgccattattctatggcgcaggcggtacatcatcctccctgggcgacaagcggcgtctcgtgcaccatctcctccggctccgccatctcctcctcaggatcctgcaccgtctcctcctcatgctccgccagcaccgtctccaccgcaggctccagcatcgactcctcctcaggatcctgcaccgactcctcctcgtgctcctacacctactcccccgcaagctcctcttccggcaccttcaaagtcaagggcccccccagctccaccgcttgcccacacaagggcaacaaagaaggcgaaagttgacgccgccaagaacaaggacccggggtacgattgcacgcaagaggagcttgacgcttacgttgcatcagaagtcaagagacaattcaagcctcgaagtccagaaaagaagattcctatagaccccagtgtcaggaacttcttcaggggtatgtctgcatctgtcaaggaggccatcaagctatcggactatgagcgaacgctgaagaaagcatcttctggaaagtccaaaccagtccctcagcttggagagcaaccaaaccaggagatcgagccgttggtgaccggtaaagaaatgacgatagaacaatttattactgacaccggtctaactacggatcaattgctaggagtcgcaccaatcgaaaaggcggaagtgaaatacatgtacgaactcggtaaaccgcttgtcaagcctgagctgctgcagtccctacccacacaaatgtacaagttccatcagctgtacatggagatgagcgccaccggtagagagatgatcggagcgaggatcagggacacggacttcttgcaaggagatgacattctctggatcaatttcaggggaatctacgaactataccagctggacgccctcgacgtctctattatgagttgctggattttgtaagtatatcgttcagttagatttcttactatacgtctcctttaattaattaggtccttgtatataagtagaccatagaaaataatatactcccttttatcgttgtagaatggagattcaaagggcccgacggcggagggttttcgatactggattcatcgaccctcggaaagtaaacgtcgcaatgctcgaccaatatccacaagaaacagaggacaatctcatccatctcctgaaggcgcagcattacaagacgttcatactgttgccatacaacacagagttagtttaattttactgtcttcctacataccaaatttcattcccgtacgaacttgctaagtgtttcatatgtaatgcatcccacgcacattgcagattccactgggtgcttttactcatcgacctggaggcctgcaccgtcaacgtatatgactcaatggataaaaaagagtctacgtttgacaaggttttcgaacttatagacaggtaccgtcataagttcctttgttaattaagaaaatcttgttatgttaattgctactacgaatcatagctttaaactccatgtagggcttggtatcggttccgtcatttggtccgcggcaaatggagagaaagacttaggcggaagttcaaatttcctgtgagtacacatgctctacatttatatttctccgattcaaatacatacaagtgtatattaattagatctctcgttgtttgtcatttatttgtagtgcgcaaagcaaaagcagggaactaacttgtgcggctattacgtgtgcgagtattgccactgccttgcagaccaaatcatcaccacaagagagctcgatgtacgtacaaataaattcaaaatttcattacgtagcgatttcttgtttaattactaatcaatttcatacattcatatagtttattcgcatgagggataacctgaccacacacaaggaatttatcgcggcggttcaagaacaactcatgggattcatcaacgaagaaatcattgatcccaagggtgaattctactacgacggaaacacaattcaccggtccttagcttctgagctagcagcgagtactactacgtcgaaatcgtagctagctaggacatataatggattgtaattaatacatgactacatatgtttctatatgcatgtgtacacattttctataatgtaaatatattttgttcatatatatatctatatacatatgcatttgcataacatatatatgtataaatacatatatattatgcatgtatatacatataatataatataatatatatatatatatacatatatatatgtatgcatatatatgtattgaaacatatatatgcatggtttatatatatatatatatatatatatatatatatatatatatatatatatatatatatatatatatatatatatatatatatatatataaaccatgcagcaacaggggcatgcaaaaaaaaaaaggtcagctcgatctttagtcccggttatttcacccgggactaaagatagcgatctttagtcccggattggtactcccggtttggaaaccgggactaaaggggggttacgaactgggactacaaaggcattctccaccagtgtatgtaacacatcaataatgttgtgttttttttttcaagaatacacaaaagaaaggtgcatctatattaaggttttataataaataaaatttacatgactatagccgtaaaaggctgtactcaggataaaaggaaacatcatgccacgtgccaacactaccaccatgcaacctgaggaaggcagccacgacgaaaagaacctccaaaccgaagcatccaaggaggttacgaggctgaaaataccatcatcgtccattcaaggagacctgaatatggttttcagcaagaaaatctcaataaaaaaagaagggagacaccttgacaaatgccctcaagagggttagggtgctcaaaggcgtcatcattactggcctaggaataccatgttggctttctcccagaacctgccccccctattgccatgacctcatcgacaaccaaccttgacaacacgcgaccgctatcataccggcgtccctctgccatctgtagacttcactcaactttagtcctactgctggcacggccatgaccatccgttgttgcatgcttgcatgaccacaaccatgaccatgactatgacccactgctgcacaacggcgactaaaatggccttcctcccatactatcacctcaccaaggagtgatgtaaccaccaccacccaccgctacttttttatttgcaatctagaccaccctcccataccgccacctccatcatctcaccatggagcttcctacaatcggatctgaaccagctctagatgaagaggagatccaaggagataagaacgtgtcgacggtggatacccatagaccggatgaatagggtataggggtacgttggtacgaggatctacacaatacgacatcaagcaaataagaagacaaggattatactggttcaggccactcttaaggtaataaccttaatccagtttatatgagattgatatagaaacaccgcagattacaatagagaatcggcgatcccgagattaccggcgagatcccttgtcaagatggtttcaacgagatctcccggcgggtaggcttcacgtcctccggattgtaggctatggtggtggtgttagcgctatgattcgatcatctagacccctcagggggtgtgccttttatatcgtgaatcactttagtctccaagtagaactcggaaactatggatcccccacaatatagtaaaaacccaatcctctccgagtaggactctgctgttcacccgctcgtgatgataatttccataatctcttgttaattcccttattgtatacagaaatatatcatacacacgaaggtattgttaatgtgaaaaacacaaactggcctaggagatctgcttagctccagcgcaagtccaaatcttagtgaggtgcgagcgtgccagtcagtttgatcctgcaacggacaagatatgtaaacagtagatcaatgagccgatcagctgataagccgatagagtagttccagccgatagccgataatagccgatgccgattccaaccgatgtcgatagggttttgagcaatcggctatatatccaatgtagataatgatataaagacaatcggctgatgataataaaatataacaataatataatccaatagaaaccaatcggctaataatgataggacagataagtattgatccgaaggttaaagcatacatcggctggaggttcaatgtcataaaatccacaagattagatcaaacagtgaaacctttcttgtgatcggctaaacccaacttgtatgtaatcctcataagccgatacaacgtccagataacttatcggctagcaccgcgataaaacactagcatgaacctatcggcttaacaagatttatattatcaacaacaatctagtaggtcgaacctaaccgatgcagcacgagattgtatatgataacctaatactcgatgagccgatagatccgtctaatttgatggatataacagatctatttacaactgcattgtgattgtagagatatatcggctaagacagaagatcagacctaaccgagacagtcccaactaaaccgatgcgtctctaaacagaatgcaattaaagatagaattgagatatcaggtaggcaaatatatcaactaaactagagcgatccaagagatcgaagcgatgcagccttgaacaacaccaatgtagccaatagattcaccagggccggcggaacgtaggacttaccccttcgccggagatcgaactgaaccgatgctgccccgctttaggtgccaaattctaccggatgataagtaaaaacctcgggaaagagggtggcgatgcgccgagagtagttgtattgatcgagagattgattacaatgaccccaggtgtacatatttatacccatggggagatactactccttgtaggacaagaaagaaactttcctaaagataaaagaaaaacataaagtccttataggacagtaaacatacattcctaaagataaaaggaaactaacaaactatttctaattaatagataactcgtcacgctgcatcctccttgaactcaatcacttctggataagcttcctttagtagattaatttccttaaccgaatatagtaagaatccgacaattggcgacttgataactctcatcggccgatcctgggattctaaagccgacactgactctaggccgatggtgacttcgggcttaccaaattttggtgttaacaggtatgctgtatccgtatattccttaagtcgtaggataagagatatgccttattcgtaaccatgacagaacgtaacgacaaaaggggacaactctccaccactgctcgcgatggtgatactgtgcggccggatctaagcttagggtcctagatccagcggctactcaccagagagcacctgcttcactgcctattgcgactagcctcttgggcaacccccactccatcaaccggccagcccactgcggccatttgtgacacgttgcccaccaacctctgcatcgtcttcggtgccaatgctctagtcagtccatcctcaatgtgtgctagccttcatctcggcaacccccacatacctagctaactgaagactctcgccgccttcccttaccactgcaaccctcccattgactggtaacaggaagcactattgactatgcctatcgtgcccacacactggccagatctagtgttcaccaccaagggaggcaacctgtgggttccaagggcacgccatgcgactagagggaaggcaccgccgctgcccacggtggcgctggcgatgagaagctagggtttgggagggtcagggaagggcaatgcggttcgcatcgtgagtcgcacactacaagaatctatttaatctgtgacgaaatttgacgaaatttttgtgatgttttcagagatcgtcacggatatgcaactatggatacaaggcccataatactatgacagtttatcgattccgtcataaaccggcccaaaacctgtgacgttatagcaatttcgtcgcgatttaaatacttcaaaacaatataagagatgtaaattttgtgaataatgttactatcactttatcggatgaagaaatgaccaaaataaaagttatagatattgatgagttgtacaactttgatgttgatgacttcttcagttaaaatcatttagtatttgaaaatgttgtttgcacttgtcataatttgaaattcaaattcaaactattgaaacagagtcatataccaaaaagaacaaaacaaaagttgtagatattgatgatttatacaactttgttgttgatgacttttttagttgaaatcatttagtatttgaaaatgttgtttgaagttcttataatttgaaattcaaattcaaattattgaaacagagtctacagcaaaatgaccaaaacaaaagttgtatatattgatgatttatacaactttgttgttgatgactttttcagttgaaatcttttaatatttgaaaatgctatttgaagttgttataatttgaaattcaaattcgaattattgaaaccgagtcatatagcaaaatgaccaaaacaaaagttgtagatattgatgatttatataactttgttgttgatgactttttcagttgaagtcatttagtatttggaaatgttgtttgaacttgtcataatttgaaattcaaattcaaattattgaaacagtgtcatatatcaaaatgatcaaaacaaaagttgtagatattgatgttttatacacttttcttgttcatgactttttcagttgaaatcatttattatttgaaaatgttgtttgcatttgtcataatttgaaaatcaaattttatataggtcaattaaactcatatggagaaagaaccaaaacaaaattggtagatctcaataagttatacaacattgtttttaacaactttttcacgtaagttcatttagtaagataaaattcgattcgaaggtttaataatttgaaattaattgaaaggagggaggcagaatggacttctcggcgagggatgagcaaaagggctggcccgtaacatgccttttgctcctccctcaccgagaagtccattttacctccctcctttcaattaatttcaaaatattaaactttcgaatcaaattttatcatactaaatgaacttatgtgaaaaagttgcctaaaacaaagttttacaacttattgagatctacctattttattttggttatttcaccatctaagtttgattgacctatataaaatttgaatttcaaattatcacaaattcaaataatatttttaaatactaaatgatttcaactgaaaaagtcatcaacaacaaagttgtataactcatcaatatctacaacttttgttttagtcatttttctatatgactttgtttgaataatttgaatttgaattttaaattatgacaacttcaaacaacattttcaaacactaaatgatttcaactgaagaagtcatcaatatcaaagttgtataactcatcaaagtctataacttttatttgggtcatttcttcatccgacaaagtgatttgtaacatttttcacaaaatatacatatctcttatattgtttataaactatttttttagataatggaatataatatcccggcctttgctcaaaaagagctacagctaattattacaaagtttcactctaaaacagagtgtagttcagaacaagtagaatacaccaagcaggaaaagaaaggacctaaactaagataaggagaacacatttattctagcctatttgtgaatctccaaccataattgacaaaaagttgcataactgtggtctccaacttgcgacatgcaactgtagcgcccgttccgtcgtggcgcctagcgggaaaactatctcttaaaaaccctatttgcgaaatccgtttccctgcttgttgcctagtgtccgtgccatctcagatctcaaatccccgatctatcgtcaagttcaatcccgaatccaaatccttcccaaatcaaacccctccgcaaaagtctgattcgcctcccacgggttcgatgggccgaatccctcacggcccatctccccctccctccccggctctctctctctctccctctcccccgctctgcccgtgcgctgcgcacgcgtgcgcgtgagccgcgccgagccgagcgccctccgcccttgctgccgtttcccgccgacgccgcccaaatcgccgcgccgtccgttgcttcccccgcgcgcgcgccatggtggccgaccggccagtcgccgccgccgtcagcgcctgccgcgcctgcccgcgcctgccgcccgtgtcatcgctccgctccaaaccgcccggctatcatcgccatcgtcatcaccttggccacgcccctcctcgcgcgtgcttcctagggacggaggcagagctcctcctccctatgccgtgtcgccccccatcccctcctccttttcccaaagtggcaagggggcaagccccctttctcttcctctttttccctttttcctcccgccggcgtcatcctccccccctgtcgccgttggggccgcgaccaccaagcaccagctcgctcccttgaccgcccaaggtcggtttccaaaccgacatcgtcgcccatataaacccaagcttttccccctttcctttcctctcccattcgcctccactccattgtcgctgcctcccgtgctctgttcgctgtcgccgttcgccgtcgctcgtgtcggaggagccggcacgagcaaggacacggaaggggacttcgggcgctcgtcttcttcctcttccctggcccgaggacagagagatcactcccgtgccgtcggcctctcgtcactgcgccccatcacccccgcacggtagtgcctccctccgttctccctcctcgttccatctcctccccttagactcgggtagtagcacgagtagcctccccgtagctagctggcgccgccccgaccgttgccgccgctcgctatgtgctcgccgcccgtgcttcgtagcgcccgctcgtcgctggcctcgctcggcgtagctccgcccaatccgacgctagcaacggattctcatagccgcttagatgctctcaccgccgggaatcggcccctcgtgacctcatcgccgtttcctccttccctcgccgccggttgccgccaccgcaatccgccgccgtcgagctccctccggcgaatccgagccgttggctcgtctcctctcgtcctgtgcaacatctcggtgtgctcgccttcgcctgtatcgccatggttcgctccgccgctcgccgctgtcgtccgccgtccgttccggccggcgtcgtcgtctacctcccgccggcccgcgtggcagccacgtaggcgccacgtcggcgccacctcggccgcgaccggatcggctgacccggccagccgctccctccgttttcccccccgtgcgcatggtctgcggtgagccgtaaggctgcgcatgggccacgcctccctccccaaaccctagcacgccccgcgtgcacctcgctcacggtgagccgagtcgccgactagcgggtcccacccgggaccacgcgggatggacccggcccaccggctctctctcactcccctccccgcccgtgcgcgcgccttgggccgccttcttgggccggccgacccattaaactcggccgagccgccccattctctcgggccgcgccctagccgcccgagggaagtctaatttccctccctccttcttttcttttcttttctttttcaaaaaaggatttaaataaatccttttcctttagaccaaaaatccaataatcttagaaactcaatatctttccaatcgtaagtccgttagactccgttcaacttccaaaattcctcaaatctcgagatctatctaatggcacgcttagaggtcattaatagggctttattttcgccgtttgttgagttgtcccgttttgcgtgtagtttcggagcccgaagacccgcagtgcgaggatttcgaggatcaagctcaagatctcgagcaaggcaagccacctttgaacatcttgagcctatatttaaacttaattatgttgcttgaaaaatattatgcatggataggatcgcacttaatctgcttgtcccgtctgcaaggcagattggcggacctacctaattagttgcatttgacccttccattgtaattgttataccatgttcccttgtacccacctagttgcgcctcggtaatcgtgcactctgcacgggtatcgacagtcgccttcaaacttaaaatctgagaatcgtcttgggtaaaacttgggttttacataagacttggaaaacccgacacctgggtcggtgcttgcgaactaaatgattttccaaaaccgcggaccggggaacgtaccgggtgtacggtttcccgctcttgcacttaaggaccgtttccttggaatttcatccgaacttaagacaattacgaccacatgggtggaatgggacacccctggctgagtaactagcttatcgggggagccatgatgctaagagacatgtggattcgccggggtggtgtcggggaggacccctgggcttcctggcacagtatggtctgggacctaatctagtgttggtctgggacccctctcgttggcatatggtgaacctgtgtcggctttcgaaatgccttgtcatgaaagccttaaggtctctagtcgtggccgttctgcacgggctggatgatccgggttagtaatgttgtgtgggtaaagtgtaccccctctgcagaggttattaaaactgttcgaacagccgtgcccacggtcatgggcagatgtgaggtgattcctagcgtagatttgtttgactactgccttgtgaaattgctgttgtggaaaggggatcgatgtttggaaaatctgcagctgatgggatcagctaggcccgggtggccgtttgaaagttgttggccgggtgccaaccttgaatcaattcaaagactgatatattgcacatactccgaccggacgagacgcactatctcatccgtgtcgtttgagaagcactcacttagttgtttcagaaaagagttcaaataaaatcaattgcaaaaacaacagcctttccttgaagcctgcattaaacacttatttcccatggcttgctgagtactcccgtactcacccttgccctatataaataatccccccccccaagttgcagaagaagatgaagcggatcccgctgacgaggagttcttccaggagcaagccggctacgatgagttttagggtttcggcctagttcctaagtcacgcctatgacgtttggtccaagtcttggcttctgcttcccttttgtaatgcagttgtgagctcgggatctgtccgcagcccaacatgactgtactcctactctataataaagagatttctgttgctgtgatactctgtcttcctgtgataccagcactgtttcctgggactggtatcgattaacaggttaatttggagcgtcacgggctagtcccgctcggggctagttcggggcgtgacagcaactttgagaaactctccatcttcattatacctttgtagttgtgcccaaagccggagccaatgggttgccctgaaaattacctgcatataggatattgaaggtgatttatcaaaaagcatattgtttctactcaaccatagagcccaacaaatggctgaagctccaacaagtatcagtttactctttttcttatcaacccccaaaagccacccatcaaaaatatgagatatactagtaggaaggttaaagccaaaaaaagaactgaactgctctccatatgaacttcgcataatgacaatccataaagagatgttgaattgattcattgttcatacaaaaactacacctcaaactaccattccaatttcgccttgccaagttatccttggttaacacaacccctttaagcaagtaccacataaagatcttaatattaagtggcatcttaagcttccaaatacacttattcctctcaatataaccattattaattaaagctaggtacattgaccttaccgagaacccaccattctgatgataattccacctaaagctatctgaagaatcattcaactggatatgtacaatagaagcacacaactcatgctaatgaacaagattctgaccaactaaagctcttctgaaagaaacattaagcggtacagatctcataacagttgcaattgaagatgatttccttcggacaatagcatataaagatggatatttatctttaaaggccatgttgcctagccatttttcttcccaaaatcttatttgttcccatcgttcactatccaagaacccatattaaggaaactattcttgactttcataagtccagaccaaaaatgggagtccccttgtttcttgtcaacttaggttatagacttattataaagatactttctcttcaataattcttgccaaaccccttcctcattaattaacttaaacaaccatttacttaaaagatatttattctgtatctccaaattatgtatcccaaggcttccctgatcttttggttggcaaataatatctcacttagtgagcctatactttttcttatggtcatccccttgccaaaagaaacgtgatctatgataatcaattttttgaagaacccctttcggtatctcaaaaaaagaaatcataaacatagctaaactcgaaagtaccgaattaatcaaaactaatctacctccaatagacagatgcttgcctttccaactactaagctttttctcaattctttcttcaataactttccagtctttattagaaagctttgaaaagtgcattggaatacctagatatttaacaggaaaagaacctaatttacaacccaagatattagaatattgatcataacactcctttgcctgaccaaaacaaaataattcactcttgtgaaaatttatttttaagacagataatttttcaaatacagataagatcaatttcagattatttgcctgttgcaagtcatgctccaaaaaaatgatggtatcatcagcatattgtaaaatagacaaaccatcatcaacaaggtgaggaactaccccattcaagagtcccacctctttagccctcttaattaataaagcaagcatatcagctactattggagataaaggatccccttgcctaaggcctttgaaagtttgaaaattgtttccaatttgatcattaacttttataccaacacgaccaccttgaataaaagaagctatccactcacaccatttaggagagaagcctttcattctcaacatttgttgtacaaaagaccatttaattttgtcataagctttttcaaaatcaatcttaaagattacaccgcttttatctttacgatgtaattcatgcaacgtcgcatgtaagataaccacaccttccatgatgttcctcccaggaatgaaagctgtttgagtgggactaattaccttttgagcaacactcatgaacaatgttacatgtcgctttgccggatgaagaaatgacccaaataaaagttatagaccttgatgagttatacaactatgaaattgatgacttttttcagttgaaatcatttaatatttgaaaatgctgtttgaagttgttataatttgaaatccgaattcaaattattgaaaccgagtcatatagcaaaatgaccaaaacaaaagttgtagatattgatgatttatataactttgttgttgatgactttttcagttgaagtcatttagtatttgaaaatattgtttgaagttgtcataatttgaaattcaaattcaaactgttcaaacaaagttatatagaaaaaatgaccaatactaaagttgtagatcttgatgaattatacaacttttttgttgatgacttttccattcgaaatcatttattgcttcaaaatattatttgaattttttacattttaagattcaaattttatatagttcaatcaaactcggatggagaaatgaccaaaagaaaaatggtagatctcaacaagttctacaactttgttttttacaactttttcatacgagttcatttaataccataaattttgattcgaagttttaatattttgaaattaattgtttttccctcctcctcccttcaaattttttcatctcctcttctcactcccctatcctgatatttttacctccattcactctctctctctctttctatcctctctctcctcactctctctttctttccttaactctctttctctcctcttcactcctcctcgggcggcggtggcatggctccggcctggagctggcggtggcgggggcggctcggcctagagctagcggcggcgggggtggcgacctcgggcgaggagtgggcggtgacctcaggcggcgacgccaccgccatctcctcctcaccgccgccgccgccgctgacgatgacgagaaggggacaggcccgatccggcggcggcgggcttcgtctcgcccggatccagaggcgacgggcctcgtctcgcccggatccagaggcgacgggcctcgtcccgcccggatccggcggcgtcctcggggaagactgggcggcgacctcggcgaccttgggcggtggtgccaccgccatctcctcctcaccaccactgccgacgacgacgaggaggcgacaggccagttccggtccctccgtcgccgcctcgcctccccatcctcgcggcccttgtcctcgcggcctcctcgccgccctcgaccgccgatgcgtcgcctacaccttcgtccgttcctcgtgcttgaggctaggtcggtgcggcgcctcctcgtggcggccagcactactacagaaagcgtttttgcatacgggcggaatcgatcttcacatgcggttggccggcccgcatgcgcaaaacggtctgcaaagatcaccatttgcgcatgcggccgtcccaaccgcatgcgaagatcgatcttcgcatgcggtcacttaagacggccgcatgcaaaaatagatcttcgcatgcagtccatctaagaagccgtatgcaaagatatattttccaatgtggtcgacctaacaagaccgcatgcgaagatctattttcgcatgcgggcgtcttaagtaaaccgcatgcgaaattcaatttccgaatagctcaaataatatttattctagccttttggtgagatgtgtctcgtaattaatattaaattattgagggatttattatcgtatttcggaatagtaagcatatgagataagacaagtgccacagtaacaaacatgtaatacataaccattaattcaatcgtaatttacatacgaaatatataatacaagtgccacagttttttcgtcatatgtataagtagtgtacatgtcattgcatatattctttctcccactctctgagaggtttaaatttgtcgtccattgcgagttcactctggttgtcgtagaagagacctcttgcattgcagacatcgcgacggatgaatcggtagaggtcagtggccacgttcaagataagtggccacgttcaagatagtagtgtcgttgaattgttgtgcaatatatgggatttcggggatctgcgcacaaaaaggaaaataaaatggtactcagtgagaagtgtgtgcgagatgggtttctttgtagagaagagttcgatgacttactcggttactggttgttttgtacctcccatttactctgagcatctcgcacacgtaataaccacacaagttggttcctggtggttgtttgtagcactgcgatataattatggggaccgatccccatagatatatttagtatatatgtactgttcgataattagttgtattggtatagatttggtagtaccggccagctagtcctgacggataactgcttctgggatggaatatgtactggtccacctcttttgcggtagtacttgtgtgctctgtttgaaggaaacaattgttttattagtagttagaagactggtgatcgacctaaacaatttatagtaatgaaatgtttatcacttacaaattcaaaatagtgaggaattccataaatgtctccttgtcatagtgtgcggggtccaatgatatgatcaattggtctttcggatctacaaggaataatatgtagtggtctctgcatataagataggcttattggagacagaaaattctgaagaagataaattaattaaacaaaaaaaagagaaagcttacatgaactggtaggggaccattaagacatctttgtcggcgtgcgccaacattgctattgccaagtatgttgctacttctagcttcttcctcttgtgcaatgtcttcacatattcttccttttcttcaggggtcttgccaaccaattgttcgcagtcctctctcagctctacggtgtgttgtgttttgcatattcttgttggatcgacatatccaacctttactccagttctatcagctttgtggaattgcatactatacaatgaataaagaagaaatgagatttggtttatttgtttggaatgatacgtgtaacatgtaataaagagttcagacttacagacagaacgccgcaacaagattaacgtccattttatctagcttgtagagggcgtaaaggtctcggaaagagataaaaaatatcccattaggaccactcatgaaagcgccttccgggacggcgacgcttatgaaactgagacctttcctagatgccttcatattccattcgtgcattaccctcatttcccatggtagcttgttcataagataagttggcaagaatggtttgccatactcataagtttcaggcacattggcagacaaccaggattgcacttcatcttgggccgctagtactgacttctgggagtctgacaagacgtgagcaagttcttttctcttctcagaattcctgaaagttgaaaacatgaacttctccttatccttgtcaatctcctttgggtcgtatgtcgatatcaactttggaattatacgacgagcttccaaaggattagactttggttcggatgtagtaccatctggtatgtgcacttgttctaccagagcagattggggtgtaggtggagaggtttgaactgagggcggagccgggggagcatgctgtttagctggggaggtgggagaggcttgaactggttgcggggccgggagaggcggctgttgagaaggggagggtggtggtgtaggttggcgaggtggtgacctaagcggtggtggtgacgacggatgtcgaggtgacggtggttcaggaggcgacagtggtgcaagagcggcagctgtccttgcctgcgatgaggatggagttgaagatcctgctgctggaacggccgcggtcaggattatgtctctgcggtgcaacaagataaattgattcactgcatcaccgagaagttcaatcccctcaggtgcaggtatgtctagttccaaggaaacgtggtcgctatggaccttggcgacctgtacccttgcgtaatcctcagggattgccgtgttgtggaattgacgtcagggtatcgctaaacccgttgcaacctccttagtctttccagcgcggccgattggtacgacgagactacacggagttggtccagttatactatccacaaggaagggagttgtctgcactgagcctacactgctgggtacattagttgtttgctgtgcggattgtgtgggttgctggccatcagggaataaccttggaaaggctgttgggtttttagctgccaacgagtagaagtgttccttcacttgtgcatagattttgtctgaaagttgttctttatatttgtctctcttcttataacttggtgtgtcttgtggaaaccctaccttccaactcgtctttgaggacaaaccccttacacgtccagagtgttcggcggtccccaacgccgcagtaagctggtctcgctccctccgtgggacgaactgtcatgatctttctttctcaactatctgctgcaaattagtagtcacttcttctatgtctggagtctcgaatagtatgtctccctcatccgagacttgacctgtgctgcgcgcccaaacccagttcttgctacgttcaaccatggggtctaccagcaggggtttgccggctgtggcaaatctttgctcgatctcccgccattgatcgacgtgaccagcgtatccgctcgaccccaatctatggggatatctgtttttcttcgcaagctcagacatttttttcctcaaagccaatgcttcagctgttgtatgatccgcaacaaacgtatcccagtcagcctgcgatatatgtccataatccgtaaacggtggaagattcttctgaacataatcccgatttagatcggactaccactgtcgccaccgatctcccatctttttaagttcgtaatctctccccctgacgtctgatccaggagggaacacaaaatacttctgcaactcattccagagaagtgtcttgatgttgtcgtccaccatttcccacaacttgacattaatgggacaacgcgtcctgactagagtgccacaggcattgctaaacttggaccgcactatcggtggctcgacgggcttcccatcctgatcgagagcaatcacgttgtaagtttccttggataatttattcttgcttctctcaccacgtctttttttcccactcccgcctgcacttgtagatgtctccgtacgttcaggtgcagacgtagcggtgtccatctcaacttcttcctctctcctgttcctcctagctttacgtttcgagcggcgtcggactaccatctgcacagaataggtaactctgtacaccattaggttcatgtcacatcatagttaggaaataatacatggctaacgattttcagcacttacgacctgttccatcggtatgtaatccggatcatcatcgcgaggggcgacttgtgttatttccattggaaacgtgtcacttggtgtgcgccacatttcttcactagaagagtctggctgcttgttgctaccggattttttaggagtgttaccttcttgaggcgctattggtgcgttcgatggaaccttatcgttcgacatcttccaacttgacgtaaaaaaatttgacataagtcccaatttaacttaatttcacataagtctcaatttgacataagtctcaatttaacataagtcccaattatacataaatctcaatttaacataggtcccaatttaacttaatttcacataagtcccaatttaacataattctcaatttaacataagtcccaatttaacataagtcccaatttaacttaatttcacataagccccaatttaacttaatttcacataagtcccaatttaacataattctcaatttaacataagtcccaatttaacataagtcccaatttaacaagaggtcccaattatacataaatctcaatttaacataagtcccaatttgacataaatcccaatttaacagaagtttcaatctaacatcgcatacaatttaacataggttcaaatttaacatcagtcctaattaaacataaatctccatttaacataggtcccaatttaacataagtcccaatttgacataaatcccaatttaacataagtctcaatttaaacataagtcacaatttaacataggtcccaatttaacatcactcccaattaaacataaatctccatttaaaataagtcccaatttaacaatccacaattaaacattctcaaaattaaacaatccacaattgcacatatcacaatccacgatccacaattaaacaatccacaatccacaattgcacatttcacatttcttttttttaaagtaaatgttaccgggggactttggaccggaggaggtattgccggcggtggcgggaaggacttggcggcgacgacgagcgaggggggagaggtgctggctgcggcaacggcgacggcgaggggggcgactttggggaggagacggcggtggctgggatgacttagcggccggcggcaacgacttggcggcggcgaggggggagaggtccgtgcggcggcgacggcgacggcgaggggcgggggacttcggggaggagccggcggtggcggggacgacttggcggcggcgacggcgacggcgagggggtagagaggtcctagcggcagcgacggtgacggcgaggggggcgacttcggggaggagccggcggtggcggggacgacttggcggcggcgacggcgacggcgacttagaaaattttggcagcttggcggctagggtttcgcgggcaccgggacttagaaaattttggctccccgctctcctgatatataggcgtagatcatcgcatgcaggcgtcttaagagcccgcatggaaaaatgatctttccatgcgggcgacttaagccggccgcatgcgaaaattatctttccatgcgggatgttaagccagccgcatgcgaaaaagatatttccgtgcgggccgtaaagccggccgcatacgaaaaagatatttccatccggctggcttaagtcgcccacatggaaagatcttttaaccaaaaaaactcatattttttctttcctctaaataaactgtacatatatatatttttccaatatttcggtacaacaaaaattccaaatattttaggcactaagaaaactcatgaaaattgctcaaaactcataaccaaatgtcacatgctaatgattacaacataagggggacttaaattcatgcacgtacatttggaacacaatgagaactaaaggttacaaaataactatgacttaataaccttggcaacaccatctgctcgaacgtacgacatattcgcttcatcgattgttctctcaaccttcttaattgcataggaagatcagtaaacaatggtacatcgtcgaactggttgtaatcattggggtcttcgatgttgtcgatgccgacgatctgctgctttccggatatgacaatagtttttctttcatccgaagggtccttcacataaaacacttgagccacacgctctgctaaaacccatggatcatccttgtggcctgttttactatgatcgactatcgttagcccgtagttatcaacggaaacccctgttgtgtctttaacccattcacaacggagcacagggatctggatgttcaggccatagtccagttcccatattttctgaatggtcccataatacgacctcttttctccactcgtgtcaatcgcttcgacacggatcccactgttttgtgcggtgcttttcatgtccttcgtagtcgtactcaaggtaaatccattgatgtcgtaaccttgccatgaattgacaatacttgaaggcccacatgccagtctttgtaaagtaagttcctccacagaatcaccaactggcaggtttagatctttgaaccacagaggaaagatacgcttgtgctctcttgatacccaatcattggaccgccctgggaagcaggctttgatttcttctaggtgtcgctcaatgaatggctcaacgataccgagctgttgaagaacgctgttgtgtgccgcagacacctttttgtaatcattatcaaagaactgcttcctaccaacagtaccccttccagacaatctcccttcatgtcgatgaacaggaatgccaatggcattagcatcctttatgtagtccatacaacactcgactgcctcttcagttgtgtatccctctatcattgatccttccgggtgagcgcggttgcgtacatagcctttgaggatcgacatgtaacgctcataggcccacatctgatgtaagtataagggaccaagttcaataatctgagggacgatgtgaacgatcaaatgctccatcatatctaaaaatgatggtgggaaatacatctcaagttggcatacagtctcgacggaaaatgtatgaagcggacctaattccagaggatcaaataccttctgcaaaattcgattgaaaaagtagcacaactttgttataaccacctttgtatggactggtttgactgccattatagcaattggtaggaacaccgttagcaacctatgacattcatgcgcattgtatcccgaaatggtcaaatccttcattgatactagcttcctgatattcaatgcgaaaccagtaggcactctaacccctagtaaacatttacagaaggcttttttctcttcaagtgtcaacgagtaacaagcaggaggaatctcggtcttcccatttggcagcactaccgggtgaaggtcatgccgtatggccaaatctacaaggtcgttacgtgacttcaatccatccttcgttttactcgggatgtccagcaatgtgccaatggtgctatcaaacacgttcttctcgaggtgcataacatcaattgcatgtcgaatctctaagtcctttcagtaatctaagtatttgaagaaaattgagtgcttcttgaaaggcgacgcagtaccgttgtcaccatcagctttcttcctctttactttcttcttctttccctttccatatacaaccttaatcttcttcgttatctcatacacgtatgtaccacctcttgctgctggggcagtgtcattctccactgtattatcgaacaatctagccatcttacggtacctatgtctttgtggtaggaaccgtcgatgccacatgtatactgtcttcaaagacgacgtcaggtatttgtacgaagttttctctagacatatcagacatccagtcttccctttaatctgcctagataatgaaaagtttgtaggtaggtcattgatggtaacgaatatgatcgcacgtagattgaagtgctcccgtttaaactcatcccatagtcgtaacccatctttccaaagctcctacatgtcctccatctaaggctcaaggaaaacatctatgtcgattccagtttggtttggaccttgtatgaggatagtgagaagaatgtactttcgtttctgacatatccatgttggaagattatacattgtgagaaggacaggccatgtgctgtgcgagctgcttaagtcaccaaacgggttcattccatcagtgctcaacgcaaaccttacattcctgggatccttagcaaattctgggtgttttgcatcaaatgtcttccactggcgagcgtcggcgggatgtcgaatcataccatctatcttccggctctcttgaggccatctcatcaactcagcatcagtcgggtttgagtacagacgcttcaggcggtccttaattggtaggtaccacatcaccattgagggaatctttccgcgcttacccttatcagaatctggatcggtacactttgaatctactggccctttccccgttttataccgacttgtgccacacgttgggcaacattcctagtccgcatattctttacggtataatatgcagtgattcttacaagcatgaatcttttctacaccaagagataaaggacatatgagtttcttcgcttgatacgtgtttgatggtacaaagttaggcttaggacgcaacacacgcaacaaactcatcagatcattaaaacttgtgtccgaccatccatgtttagccttcaatctcagaagttcaagcactaaacgcaagactgtgaaatccttatcacatcccttcgtttcatcgtaaagaagatccttcgaagccttctctaatgcctgccaattctccaatcctcgtgacctgcccgctagcacctctggttcaacatggcgtagcatatcctctaaatcaaaaccaccatcgaaatcatcactaccggtggaaacatcgacatccattctttcacgggacatgtcttcgattataaaattctctgcctcattcatctcaaaacttaactattcatcgtcatcttccggattggcgaattccccgtgataggtccaaaccttgtagttggcggtgaatccgtactccattatgtgacccaatatttcaccaggatctaccaacaatttctgattcttgcaatgacggcacggacaaaagatctttgtcatattctccctcaaaccatgcgccttagcctgatcaataaatttagatgcttccttaataaatatcggctgcgttctccgcatctcatacatccatgatgacctatccatctaattatataaaggcaaaaaagttacagataaaaaaatagactgcaggtatttcatataaaagtttaaatgcatttgtctaccaaaaaaaaattacaacaatacatgtaactagtatttacaagtgattacatgcaaaatttgcccatcaaaacatatattttgaagctagattttgcaaaaactagttagaacaaaccttgtcaaaatattaaaaaaactccactttccaccaacgagatataacaaaaatggagccaaatgaaggaggagagagagttcttcacctttcgtatagagttcaagcaaaaatttcgagttgaaaacctcccccccctaattggtgcttgctttaggagagagagagcttcgttttcaaatcgtcaagctcgggcctggaggagcatatatggctgatcatcgcatgcggtcccttaagccagccgcatgcgaagatccattatcgcatgcggctgcttaggacagccgcatgcgataatgggcctattttcgcatgcggccgtcttaaggagccacatgccctaatacatgcggccccttaagacggcggcatgcgaaaatagacctattatcgcatgcggctgtcttaagcagccgcatgcgataatggatcttcgcatgcggctcatcgacccgcccccggggggagggcgggtttgcaggcgccgccacaagcggcccgtatggaacctaccgaccccctcgtacagaaaaacgatttttgtagtagtgcgggcagcgggcccgcggcggtgcggtaattcaaccaattttatcagcacttgcattttgtagttaatcacgacaacaatttggtctgcaaccacatgaactatccatgaggcaaatatcatatgttatcacgattgattctgagccttcagtccttcacatatttaatgtccatgttgcaaaactttgcatgggatggatttaagttatttcttgtgtatgtgctctctttgccaaatatgtgtatatcacatggtcttcataggaggacaacggagctatatcattatatttctgtagcatgatggtgcaaatttagcctgtgggatggttgtgggagggttcttagttaacctggtgggtggtgggtttaaacagaggccaggctgctgctcaaacaagggacttcctggaggaacatggatgtgggtgtcctacaaaatccctgtgaggatactatgttccaacaggctgaaattttctagctgcatttcaattaggataagttgattttttttcataagttgaaattttcttaattagctggccctttcctttggaaggctttcttcctctcattattttctaatgagtaactgtgtcatgtcctattataaatattttggtttacccttctgttatgccttgtcgtgtggcacaatcaatacaataacccatatttgttaatgaagctaggaactaaacattggtgggagtttggttgtatctgctctggaggaggcattaggacccaacagatctaaaatacatgagatgtgcaaaaacgtacggcgatcttggtaagtttggaggttagaagtaacaatgcattgttgatgtccatggtgtggggaaaaaaatactgtatggtgtaggctgtgtctttgcaaaataggagtttaatgcatgcatgcaacatttggcaggcttacagccaggtccaactgccttgtttagcttcatgtgaaacgatcctgtgtagtgttaacagtggatgtatagtgtaatttgtaggcgatgttgcccaagaatgccgccagaatcaaatgttacttgctcctcctcgtccactctcaattcgcgatgtgttttccacacttcgcaaactaaggtattattactgactaactttagaaactttagttgttctgatatgtgagagaggttccactggattttctaggcaagctctttgttcttgtttttttttactaatgttccataatactctttatgtgctctctatatgcaaatactgtaagttttttttaatgctttacttatgttatatgaaataccttccacgttataaaaatattagaaccatatgatgatagcaatcttctctgtttgatgatagcaattgtagtatttttaacatgaggcaatatgatggaaaaaggtttgtgggtctcaaaattctgtgtttcttagtgtttctgaaacatctcatagcaaaattagccaacacatgcatgcatgctgtggcatgtgcatttgatgctaaacaaactctaggaggtgttttatagttgatggttggttgaattacttaattaactataggcggtgggatagtgtgatggtcaatttggacacatactaaatggtttgatctttgatgattaattttcctttttataggtgcaaaaaattagtggaaacttggtttgtttctgctcatcttaggagggaggactaatattgttgactcccagtattgatactaaaattgtatttttgcagcacatctcaagaagctatgtataagttgtagcaaaaaattccatttgcaaatcaacaagaaggccttgctgtaattcaatcctctatttgctgagtggaggacgagaagcagggagtgattccattgaatgtttaaaagatatgttttctatttgcatatttcctgttattatgttgaatctgagatgaactattgtttgaattatgctgtatcctgattgtatctgttattagttgagtctaatatggtatatgttattaggtttgaatctgagatggtatgagaaattggattgaatttggtgggctcaaatttaattggactgtttagtgggctttgatataatagttagttgataaaatgggccagttttgaaatgggcctagttctgaaatgggcctatttaaaaatgggccagttctaaaaaaataatgggccgctgttaaataattaatgggccgttaaaaaaattaatgggtcgttaaaacagatggttgccacgtcatcagtgacacgtcatcgtacacgtgtcaaaacaaccacgtcaactgccatgttggccgccacgtggcaaccatctgtgacgtttaatttcgtcacaaaggttgggcctgggctggactacatgagcccataagcgttttatgacggttaaaaaacgtcatagattgtgctgatccgtgacgatttcggagaacgtcggcatatttaatctgtgacacacaatagatgacgataagtataatcgtcacatacaaattcctgtgacgaattttcagtgatccatgatgaatttttttcgtcatagattaaatagattcttgtaggggcaggagcggctaacaagaggcgataccagttcgaaaagctttcgaattatgtgtgtttctacaaaagctttagaacatttcatccatgattcaggactacctgttcaaacaagacaccatactcatataaccatggacaaagaaatacaacaaccaatttgaactacagtcttacaattctaatattgcacctgacatgggtcacattgactttctcaaacaaaaatgaacaaactaactttgcactaacatatttactatctccccctaaaagtttatgaagtatctgcaacaaagtcctggattatggtacgaaccgcaataggaattctcacagagtgtgtgataccatcttgccatgtcaaacttccaaacgtgtagccaccttgcactctctgtcttgtggtgaatgtcaccttaaatgtcacacttctactaccgccattggtgaatttgatcactgaaggttccacagacatggtcataccgactggtgcctcaagcattgcatggtaagttgcttctgccactccgatgttgatgatggttcgccaaaccgtgacagagtacttgagatctggtacgacgatggatgggaggttgagctggtaaagttgcctcatgtatgactcacattcatccttggggttgatactgcagttgtagaacttagcgtactctcttggatctatatcatagactaaaccagggtcaaccgctctatctgattcaatgtggccaccaccgaagtcgaatgggtcagccactttccttggcactccctcggcttggattggtatgccaaaacggtcagtcaccgatgctgcaataatcaacagagatgtatacccgttagacctaattaagcaggaagcgatgagtttgtagaaacaaatcaatcgaggtgatcaaaagaaacttgatcatacctgtggtgacgatggcggacttaatcatggcaggcgaccaatctgggtgaaccatcttgagcagtgccaccaccgctgatacgtgcgggcatgccatggatgtcccagacatgaactcgtatgagtcacccaaggctgccaggatgctgactcccggtgcagcaatgtcaggctgtttaacagacagaaacaagttaagtattgacatatcgccacaaccaaatactagtgatataagaccatgtagttctcattgttgtaaatgtatcacttgtttaataatgcatgtcaagatcagcatgtcaccttcagtataccgggaaacaaggagctcggtcctctcgacgagaatgcagccaccctcggtgagagcaccccacttccgaccacggtcatagccggagacacctccaccaccggcatcctggaaaatcagagaagttaagaaacatctgaggataggattatatacagaactctagcttctttgagagcacatatataattaaccatatgctttcccgatggatcatggaaatgaaattcgtgattttcggaattggacagtcaatgctaattgagctcaatcccaccttgtggaggccacgtaagagcggattctgtttgcgatctcgtagtcgacgagtacacagggcatgctgccattgcaggcgtccagatcttcaagaatgttgacggtgtactgagcgaagatgagacccgcggcgcctgcgttagcgacatcgccaatgattgcaggcagcatcaggcgaggcggatttaacttcgcctgcaacggcgccgagcacagcacaatcttgccagtgacattgatcaacgccagcgtctccttgtcgcagctgcaagcaaaagtttttgatgaaactgatggttagatcattcagcaatgtaattgatagaatatttttactattgactaataaagtgaccggctgaccgctcgtttaattacctgaatcctccatcaacgagcatctcaaattttccgctcttcgctggtgctttgtagtaaagagattgcccctgtaagcaaaatcgattaaatattcatttcaactcattgtcaagagacaaaaaacaataggttgacaatgggtatcaaaattcggatatacgtgcgtaccaccagcttctctttgttcccgagcgatatcacggttgggaatgtccgatcaatcgtgctggcagccaccgtgatgacccatggcaaggtgctccccaccgtctgcggtgtggggccgtcgttcccagcagagaacacgacggggatccctctcgccacggcgtgacgcgacgagaggtactcgacggggcctcctatcgacagggacagcacatccacgccgtcgttgatggcgtcgtcgatggccgcgagcaccgcggcgttgctgcaagagatcccaccgccggcggcgccccagcacgccttgtagactgctacccgtgcgcgcggcgccccaccgtgtgccgacccagcggccaagccgccccgcttgtggctcgcgttccacacctgcccaccaacgatcgttgaggcggtgtgcgtgccgtggccatttgcgtccctcggtgacaagtactcacccttcagcgactcatcctgaatgccacctgagtaccaccgggcaccgatgatctttctgttgcaacttgtggcattgaacgccatgccagtttggcacttgcccttccaccgggtcggtacagagctgtacccactgtcattgaagctttctgattcaggccatatacctgttgcattccatcaaagcttaaaccaatggaaatttgcatattattactgtaattaatgctagtgatgtcggtcataatagtatatcgtactatagttttaaacctgagtcaatgacaccgactatgacatcttcaccatagttggctttctttagaaggcctgattgttcgtaatagttcaggcctaggaaatcccagcttcgagttgtgtgtgcttgatggtaaatgttaggattcacgctgaggacttcaggtaattctgcatcagggattcataattagttcgttaatggtcatgcatacaaatcgtaacactaaaacaacatgcttatgccattgtagggttaattgttacttgcctgcaatttcttcagcttgagattctgtgagcatcgctgcaaatccagagaacccatgtttgtaactgtacactatagacctcatggcttcatccttactgttgtgttacattgacaagaaccacaaaattaaacatgagcaaccagttttatcgctcagtaaagattcagaagaagataggacttgaactactacctcccaagaacagaagcaagcatgtcatggtgcgatgccgtgaccacaaacggatcgtcatgcttcttctcccccatgtacacgatgtagagctgaaatttcgatgtaaaaaggtttcaagaatcaatgtcagtaactttcctgaggaaaaaattaggcgatattgcatttcctgaatgaggaaagcatgcatcttactctacttgatgcattggtgaaaaagggggaaactagtagaagaactagtagcaaaatagaagagaaagctgatctcgaatccatgttggattttgagtagtttgttcttgtggttttgtgttcacgtgatatagtatgaatgtataaatagcagtctggccccaacaaccatttggctgcaagaattggtcgaaagaacatccttctgatgtttgcgtgctgatattaataagtaccaaaaagactaaatccagtccacattgtatgggactacgtttaagtcacaaattaaaagactaaatcaagtccaaattgtatgtgagaagcactgtccacatttgttcacatgcttaaacatacctacggaaaaggatgtaatgacccagtcaacgttgtgtggaaatgaagatattttaaatcctttgctcaaacatatataataacagtgcaccaatgatatgatgtaaagcaggcatgtgtggtatgacttgttcttcttgtggaggtttaaatgattggtttccgtttgtatatttggcagaatttaccatatcttaacaaaaaccctttcgcatgagcttgttatatatgtggatttttctggcaaaattgtatggaattacgcatggccagcttatcgataaaaatgaatattattccactccaaaactaaataaaaagatcgtttctacagacttaatatttaaacttacaaaatatttatgcattaactttagaatagcaaaaacattatcttgtgcaaacaaaggttgatagattttagaaattatatatgttacatgttcgaacaatggatttaaaataactcctttacatgtttattgttctagttttcaaattcccaaagtcaagcttcatctatcatgtgtatagctaacacatacatcatctatttggctagaccagaagttacttggtcaatatctgaatatcccactgtcctcgggtaaataggagtatcattttataatttgtgtggttgtgtggtcaaatatcaaaatcttatatcactaacgtgtgtagaagtactaagatttgatatgcgaaactaacgctggtagatttgtactataaaatatactgtcgtgcaactatatttaaataatattagaatgactaaacatgggcatatattgaagatttgtatcaatgtactaaggacaggtactaaaaagaacataaggatatttgtcaagtagaactcgttgatgaaaggaacctttttcacgaaattttggatggattgagcttaattttttcactgccatatcatttcttgttttcgatagaatttgcttggttaattcatattgggttcactaaaaaaatgcttagatcatatgttggcaaagattgcgcacactggtagagaaaccatctttcgtcggtcggccgatttccacaatagtcccggatgcaataaaaaccggggctaaagatgatctttagtcccggttcaaaagggtaacgggcatatttgatctttagtcccggtttgtgttaccaaccgggactaaagatcatctttagtcccggttcgaatgctgtcaggacctgtcaggcccccccgggatctttagtctcggttggtagcaccaaccgggactaaagatcttaataccaaccgggactaaagatcccggtgtcccggttggtaataccaactgggactaaagatcccggtgatctttagccccggttggtgctaccaaccgggactaaagatcttaactttagtcccggttggtaataccaaccggggctaaagatcccggtgatctttagccccggttggtgctaccaaccgggactaaagtcccacccctatatatatgtcttcttcctcctccagctgcccgagcaagcttcaaaatttcttcaaaaaagaggggaggtcatgccaaaatttctattgaatttattttggtgattacatacaaatcggaggtgcctaaaaggtttgcaacttcatcctccaatgtttttttttgtcatactacatttgcacctatgttttgcacactttttttgtctccaaaatttagttgtaagttgatgagagagaaaatgtgtgtggggaagaaagaatattactgacaccggtaaagaaatgacgatagaacaatttattactgacaccggtctaactacggatcaattgctaggagtcgcaccaatcgaaaaggcggaagtgaaatacatgtacgaactcggtaaaccgcttgtcaagcctgagctgctgcagtccctacccacacaaatgtacaagttccatcagctgtacatggagatgagcgccaccggtagagagatgatcggagcgaggatcagggacacggacttcttgcaaggagatgacattctctggatcaatttcaggggaatctacgaactataccagctggacgccctcgacgtctgtattatgagttgctggattttgtaagtatatcgttcagttagatttcttactatacgtctcctttaattaattaggtccttgtatataagtagaccatagaaaataatatactcccttttatcgttgtagaatggagattcaaggggcccgacggcggagggttttcgatactggattcatcgaccctcggaaagtaaacgtcgcaatgctcgaccaatatccacaagaaacagaggacaatctcgtccatctcctgaaggcgcagcattacaagacgttcatactgttgccatacaacacagagttagtttaattttactgtcttcctacataccaaatttcattcccgtacgaacttgctaagtgtttcatatgtaatgcatcccacgcacattgcagattccactgggtgcttttactcatcgacctggaggcctgcaccgtcaacgtatatgactcaatggataaaaaagagtctacgtttgacaaggttttcgaacttatagacaggtaccgtcataagttcctttgttaattaagaaaatcttgttatgttaattgctactacgaatcatagctttaaactccatgtagggcttggtatcggttccgtcatttggtccgcggcaaatagagagaaagacttaggcggaagttcaaatttcctgtgagtacacatgctctacatttatatttctccgattcaaatacatacaagtgtatattaattagatctctcgttgtttgtcatttatttgtagtgcgcaaagcaaaagcagggaactaacttgtgcggctattacgtgtgcgagtattgccactgccttgcagaccaaatcatcaccacaagagagctcgatgtacgtacaaataaattcaaattttcattacgtagcgatttcttgtttaattactaatcaatttcatacattcatatagtttattcgcatgagggataacctgaccacacacaaggaatttatcgcggcggttcaagaacaactcatgggattcatcaacgaagaaatccttgatcccaagggtgaattctactacgacggaaacacaattcaccggtccttagcttctgagctagcagcgagtactactacgtcgaaatcgtagctagctaggacatataatggattgtaattaatacatgactacatatgtttctatatgcatgtgtacacattttctataatgtaaatatattttgttcatatatatatctatatacatatgcatttgcataacatatatatgtataaatacatatatatatatatgtatgcatatatatgtattgaaacatatatatgcatggtttatatttatatatatatatatatatatatatatatatatatatatatatatatatatatatatatatatatatatatataaaccatgcagcaacaggggcatgcaaaaaaaaaaaggtcagctctatctttagtcccggattggtactcccggtttggaaaccgggactaaaggggggttacgaaccgggactacaaagggtttctccaccagtggcagttgtattcaaaattaaactatgatattgaccttaattattatgctcaaaataactgtgtcttccctaatttgttagagccaaaccatataaatttactagcaaagtatccctgtgttgaacatttccgaaaattcctcatactcgatttgaaaatttgaaagcgaactcaattttccccttttgaatactttcttcttggatcagtcttccttttctcaaaattctttcaaattgtctgtagatcaaaatccacgaaaagacgcaaaagtccacatatatgtccttgtgttgtgattgcatatattaaatgggatcacttctataggtttataggatttaaagacgagcactcctgtcggtgaagttaatttcactgtcatatcatttcttgttttcgtactcttaagatatttcggttaacccatctcgcaagagaattgaaggggatttagaaatgtgaaattaatccctttaattgtctcaaatcctttttttgcaaattaaccgagaataagctctaaggcggttcacaggtaccttgtccatcagagtgacagagttctcgatcaggtccaggctggagcacagcttgactaattactgcaactaggaaggtggcccgcgtgcatacacgggcacttaaattattgaaaggtaagattattgtttgttcaaaaattttatctcatacattaagggcaaactaaagttcggataacaatattttataataatttaagggttctatttttcttaagatatcttaaaaaaccattcacaaacttttgagtaggagataggttaagtacttacgactttttaatattttttttctcaagtaaataaggaactattgctagttaattattatacggtccatctatatacatatcatgtagtatggtcacaaatgaaaaatacgagagcaagatactcaaaaaaattcttgtgattaaatcgtctcaagaaggcgcatgatatagtaagaaagggagggaagtgtatgcatgaaaaaaaaaagaagaaagggaaaaatgaaaaaagggagaggaagcgtacgtaccaatctacgtatacctatgccacgggacgagaggtgagaccttataatatttagtttttttttagatcaatttaatctaacggtttataataacggtttataatattggacgtaccgatttaagtgaaaaatcaagtaatgatttgcttttctttccttagaatttctaatatttgctctaatttattagaacaccacgtggcagcttgagaacgttttaagaaattttaatgtacttaacacatgtaattagaatattaaccgcttaatatatatatgtatagggcatattgtaatatttattccagcttcgtgcatgtttatatacatgtagagagaaattaattatgtggctggtaagcaattagatgtctaattagtagcaattaattttgacacctatttacagttgttcatagtagctcttatatattcatcttacgactttgattatacattgatccccaatttactgattacatgattcgcataaaaaaaattatgtactacttaggtttaggacggctgaaattgatgaattatctgatttatgtgatagctatttgagggtataaacgaatgaattgacttctaaaaagttaaaatgctgtttaaaaaagacacaatttagaaacttggaaagcgtgcaaacaaaaatccaactatagaatcagggaaaaaaagagggtcttaaactcccttataacaccgtagtctttgtaagagtgctattgatattcgttaatattgtgctcacatttataacataatgatttctttcactattacgaacaaatagtacaaaatccaaatacgacataacacacttcattataattattctctaatcaactctcggtttcagcttaaacagagctaagtgttggcaaaaaacacaacccacagtgcttgattcttctctcactgcatcacacctttaattttcttttcatgttattaataaaattaatcatctccatatatgatttgatatgtagcaaagcggtagtgttgcggtagtcgtgatcaccttagatgcctcagacacgatgctttgtcacgcgtgcaaaaggcaaaggtgcagacgtgcattgtgcagcggcaaaaaagagaacttcggatgctttatttattagcaaataatatatcagatgatttaaataatgggtccaccggttctagtgtaagtgtatattagttaatatagattttaaattgttaatttgatgggtacataatataatggtgtagactttattttgaaaccatacattatttgagaataatagtccaatgtaataaaaaatagctctaatgatttaaataatcggtttaagcgtacatataaatcagttaatatagatcttaaattgtttatttgataggtacacaatataattgtgtaaactttattttaaaatagtgtattatttgaaaataatagtacaaaataatgagtatacaggtttaagtggaaactatattacattattaatttaatggtcacatataatggtttaaattttatttttaaaaattgtaatttagttaccagtgagttgtatgatggtagattctttgtgttgtaaaattatgattatttaaagaagtatatattcattatataaatggaaaaagaagaaaaaaaggaaaaaaaaagaagaagggaaggaagcatacatacacgtatatatacccacgtacccctgcaccggagaaggaggagaggtgggactccatagtatttggtttgttttaagatcaatttgatctaacggtgtataatattggacccagcaatttatgtgaaaatcaagaggtagatgttttgcttttttcttagaatttttaggattttttctaatttattagagcgccacgtgacagcttgagtgcgtttgtaggaagtttaatgtactcttagtatataatagattaagtggttgtacttaattaatacttttagaaagaaaggatatataggtacagtattaggattcctctcgtgatcaggaaccaatgcgaactactccctcattttctaaatgttttacgcattgacttttttaaacatgtttaatcgttcgttttattcaaaattttttgtgaaatatgtaaactatatgtatacataaaagtatatttaacaataattcaaatgatagaaaaataattaataattacttaaattttttaaataaaacgaacggtcaaacatatttaaaaaagtcaacggcatcgaatattttgggatggagggttgttttggaatcttatagagctctaaagcatatatacgaaatcgtgtaggataatactaagtaaagcgcctagaaaattaagctgtgccttacaaaaatcgacggaaataattagccgtatatattgttcaatctcgtcggcttctgacgcatgcaagaatcaatctaatagtagctagcaatggagatcaacaagaaggcgcaggactcgccgtcgctaatggaatctcgcttagctccacttctactcttcggccatggcgaggccggcgacaagttcttgtacagcatacccagccggcggcagctgacggcggcggcggcggcgttcgtcgacctcatcggccactactcctggatcacgccgcggggctgggtgctcacgctgcagccggccggccggcgcggcggcggcgacgcccccgccgaggccttcctgcgagacccgttctcctcgcgccgtgttcccctgccgccgccggacgaggagatcagcggcctcgccgcgaaggcgctaggcggcggcgacgacgacgcggcgtggtgcgtgctgtcgcacgacgccgcggacccgcgctccgtcgtggtggtggtccaccccaccgagccggtgctgttctactgccggccgggaccgggagacagcgccggccggcggcggtggctgaggcacgagtaccagccggaggcgatcatcgccccggccaaccacgacgacgacgacgacctcgacgccgtcgtcatcgagtctatggggtggctcacggcgtcgggcggcaagctcttcgcggacctggagtggtccggcaagatggcgacgctggagttctcgccgtcgccggcgacgccgacgctggcgagcgctcccctcgccatggtgccgtgcccggcgtggtgcaaccactggaacagctcgctggtggactcccgcggcgagctgttcgtcgtgcacttcaggaactcgctgctgtgccagcgcacggtcctgctcgtgcaggtgcacctgctggactcgacgcggcgcgcgtgggtgaaggcggacgggctcggcagcaacagggtgttcctggttacgagccagtttggcgtgtccatggcggcggatgaggctgggttggaggagaactgcatctacttcaccaaatcggatgacaaggggttgtatgtgtatgatgtgggacagggaacaactgctttgtatgatcctggagaggacattcctgattccatggagcctatacttttgatgcctgtcagttgaattcggtgcggattcactgaaatgtttcaaacttaattttggttcctgcttccgatccacctgtggtgaagctgcttctgattctgaatctgattgggatttttggaccaacacgattgcaactttgcaagtttgcaaagcaggacacgacacgattgacacacgacgagttgcccaagaacttgccagtgttacggcttgtactaatagcacattccaacatatactcggatacaatctgtcgttgaaatgtctggactccgcgtccctgacggcctgatcgatcgacggagcgcgcgatctcgccacgatggacgcacggtcgatgtcgtcttcgtcgtcgtcggagtggcgggactggtcctctctaccggaggacctactcctccttatcctcgagcggctccggtggtcaagccacccaagcgtcgccgcggtgtgctcgccatggtgctccgccgtgccgccgtcctacccggcgtggatcaccccgctgctgctcaacgccgccgacgtcggcaccaccaacatccggtactacagcccctatttccacaagaacttcgaaatcgaccgtacgctgaccgatcccggtgccaagatctgctgctccgccgcagaacacctaacgactctatgcacgccggacgacgtggtcctcgacgccgacatggtctccggcagcatccgcgagctcccgcgtctgccggatagcaagttcaacttcatcgtctatgacgacggtgcgttgcggacgacgatgtacgccatcgacacggttgggtcgctgcgtatatgtagaaccggactaaatgatgacagcgagtgggatgactgggatttggtggatagccccgatgaacaaatggttccgacattgccgatctccaacccggtcttccatggcggcatgctctacctccttgggaaagatgggaggctggcattgtatgacccgtgcaatcacgaaagagggtttgaaattcatgacaaacccgagagctttgggttcgaaaccgatgatagctacctcgtcgagtctgaacaaggcgagttgatggcaatcctcgttggccgacgagggacgccggtgcatattgtgaaacttaacgaggaggcgatgaagtgggaggaagtggagagtttacaggggagaacgttgtttaccggcacgctcacgacgatgatgagaagtgtcaagatcaagtggatgcaaaacaaggtttttcttccaaagctttatgactggcctgagactatccaagttaatcttgttcttcgtgatggtgaattagcatttgtaccaaagtcgggtggtgaaaatactattttgaaagatggtgaggactatatggagaaaatgtggtgttatgaaccaggacaaagacaggcaaagaagttttggggtaccaaaagtgtggattatggcatttgggttaattttagcacttagtattgattaatcttcggtaatgaagtttattgtaggatgctttatatgaatagagggggtcaaaattatacttatttatgaagtttcttaagaactagaaaggaagcccgcgcagatgcgcggtcatcttatttattatttatagaaataatgttaaatagaattaagtcatatctcactatatgcatataatatattgtagatttcaccttataattaaaaaaatctttgtcgtaaaattgaccgtagactttaataaatgataagaatgtttcttatattcaaacaaaaatcacttttgtccatatgacacgtaaactcgcctattgtcactattactaattatcattgttgcttgatacctttttaataaacggaactacatttgtatcaccaaagtaagcgtattacatcattaatacataaaacatcaatctccactacatacctaaatgtttatgttaactcttatttctaaatctataaataaatattctaaaaatactgcttctattagttaaagggataacactgttaaaaattagacatgaattaccctctaatgggtagagctaccaagaatttatctctattgccttcaaacataggtttcagggcatccacaatgtgaagcaaaagtagtccataagcaatattatattacattcaactacctattaccattgtgcaactagtccatgtggagaaaataacaaaaggtatccataagcatatggactacccatatggaagaaataatactatctatctctatctctctctcatctcctaatactaccttgtatctatatacattgtggagattactacagttaaagtctctttatatgggtcccatctatatggatcacttttaccatatacattgatgatgccctcatagcgacgtacttatgccaatcaaagccagtgtggagcataattcttaagtcctatttcactatcggcaccatcaaagcttattgcattagtacgtaggaagttgagtactattgtcagtggtggcctccattgggtctgtctcaactcaattatatgtatgtccctcctatagttgtgttaactggctaactgctcgatgcccttcaggaaagaaagagaagatagatgtgaagaaaataattctttccataaaaatattttttttaacgttttgagtagagactatttgtttgtagtgttaatcagtactgcttattctcttttgaaataagtgaggttgattattaagaaatgtatcgctaaacatacatatgaccatgacaatcttttaaggaagctcgtgtggttgcgcgggtatcttatttattgttctatgaaatagtgctaaaagaagtcatatctcacatttctatgtcgtgagatagatcatagactttagtatgcttcaataataataatttctctcagattaaaaaaaacactttgtcccgattatatataaattctcctattaacgtaacaactcattatcactattttaaaagctgactacctattaatagatgaaattgcataaatgcggataaaataagtctaatatatcattaatacactacttagctaagtgttcatgtctcagatatatatattttagcgtctagtttattttcgtcacctatttttcataacaggttcatcaatttaaatgaaaatcgatggcgagattacacagtgtcacatgacggttcaagagtgcttgtagaagcatcacgtaaccatatttgtgaagtaataaattttattttttatataaaaaatcctttttaaaaagatagtctatttttcgatgatggttctgatatttacatatatttttctttagggttttatagcttttttaacgtacatcctttttttttcaaatgaacagtaggtaaaggtattttttccatcgctaaacggtacgtacgtcctttgttttgtttttcaaatgaatatagtacgtaaaggtatatttttttcgtactatgtatttcggcccatagtacgttttcctggtatgctgactttttttaggtaagtgtaaacggattatgtatacacataaagtattaacctttttttaatagatctaatatcacggttttaaataacgggtccaccaacttaaataaaaatcgacggtgaaattatagcatgccacgtggcaatctagcagtgctggtaggagcgccacatgacggcttaaaagcgtttataggaagattaatggacttttagtatataatagatagatagatgttctatgactatataatacatctctcatcaagattattgatactaaaaaaatcacacaaagtatatctacgcgaaccaactcaagtactagttgatggcaacattattgatggcagaactgaaataaaattcaggtgttgttaattttgtaaattcacatgcagtactctaccagttgacaataccatgccacaccaattgcaacagtgtaacatgcgaaggaagaaagattttgagggtcacagttccttagatattgaggaattcgatcaatgaagaaggtttgaatcccgatttcgacactgaactgaatgaattttgaatttacgaaaacttgaatttggatatgaattaccaactttgtcttaaaaaaagtgtatttcttataaatataacttgtctaggtgcattaccagaaatacattcttttttattttgaactaggctattgaagtttgatttttttttaaagagagagacaaattgaaatccttagagtaagttcaataatatatccaactactacctccaaaaactaaaacatcatctacaacaaatctaatagctctaatagctcacttgtataatagttagttacacatatatattgcataattaatacctaatccacccatatctctaacataatttatcggagcttgtgctgcagctgggtataaatttgtaacttatttttttctctcttctcttctattctccacgcgtaagcacaaatatgatatgataacttatacaacccgtttacattatattattatactcgctcttaacgctattaatttttattcaaaagtaatactccctccattccaaattgatctacatatagtttttttaggttattcccaaatgatctacatatttgtgttcatgtattaagtctatttgttattcgtgcattgaagtaaatagacattgatgcaagcatccatgcacacaagtatttataacccacatgcaatatcttgatttgctattggctaggaaatagtggggatggtgcatgcatcgagtttgttgctagagtaaatatagtatgagagagttattagcttttcttggtcttagtgtacctatgaaatatatagatcaatttggaatggagggagtactacttagcagattttttttattaaacttgagttttttatggtctcaccacaactaaccgatgcttccttctattgactatgttgactgcctttattcttaatagtaaaaaaaaagttacccaaaatgacaggtggcgcctaaaagatatctatgcccctagtgggttttagttaattgatgacaaaagattaagggactaatgtgtttattgagtgtataattgttgatgaaaaattcgtgctcagccaatgttgccggaactgtgttggtgcgaactaagtcgacaaacacaacagcttgagagatctgcttagctcctgtgcaggtccagaaattgatgagatgtgggcgtgccagtcagtttgatcctgcaactgacaagatagataagtatgttaatcaccgaagagccaatcaactgacaagccgatggagttattccagccgaggctggtcctagccgatgtcgatattagctaatgccgatggggtttcgagcaattggctatatgtctaatttatattctgatacttgagtaaataatgatatatagacaatcagctgatgataatataataaaacaacaatataatctaattgaaaccaattgggtaataatgatatatcagaataaacactgatctgaaggttaaagcatacatcggctgaaggtccgatgtcattaaatctgaacgattagataaacaatgaaaccttttgttgcaatcggctaaatccaacttgtatgaaattctaataagccaatgcagcgtccaaataactcatcggctgaaaccccgatgaaacccttattggcgatcaaaggcatgttaatttctatgtttctaaccacgactatggtcgatgcaactcaaagtatgcaaagaaatataaagtctaaacaatcaagcctttgactgattttaagagtggcggataacttagctaatctaatctggaaaagcaatttagttgataccggcgaaaaccctaaagcagatcccaaccaatacgagtaaatcgagctaccaaactagattagccaagatatatgataggtaagcaggcaactatatcaaccgaaccagagcgatccaagagatcgaagtgatgcagctttgaagcacaccaacatagccaatacaattgcctgagctggcggaacgtaggacttaccccttcaccggagatcgaagtcgatgcagcctcacgtgaggtgccaagttccaccggtgataagtgaaaacctcggaaaagtgggtggtgatgcgtctagagtagttttattgatcgagaggtaatttacaatgactcggggagtacatatttgtacacatgggtagatactattccttattggacaagaaagaaacattcctaaatataataggaaaacataaagtccttatcagacactaaacatacttttctaaagataaaaggaacctaaatgactctttctaattaatagataaactatcatatcgcatccttcttgaactcggtttcttctagataaacttcctttaattgattgatttccttaatcgaatctaccaagaatccgactattggtaaaattgatgatgacctcgaggcttaccaaattttggcgttaacaataatcaagggattagttcgatgaagaatcgacaaagatgatgaagaagaatatgcaatacaacaaggtttcattgcgatccaaggctacaagtgacggaagatggcaagatgcagtgaaggttggcaagacttggctacacaatggaccatgcaagggagaagggcaagcagaggcttggcgacgaaggatgaaggagcaagtgcttgaccgaatgccgatgaatcgatcgaggccataggatgtcagaagttgccgagaatcaacccttggtaaagaagaagtgcaagatgaaatgtcaaaagatcaagaggatatgatttgttgatgaacatcaagccaaattccatattatcattattcaaggcaaagaaagacgatggcataaaggtactcgcattagtatagcttttctatttgctcttgagttggtaggaaagccgtaccattaagggaaatgttgccttgatgtctagggatgagtttggtgctcaaaatctttgttgaagtggttctcactcttggatttgtgtgttggagtttttcggagttttttgaaattggtttcggaagttttcgaattggttttacctttgaaaaccggtacaggtattttttcggaagtttctgaaagtcattttcggaaatttccgaactgatttgagtttgcaaaaatggtactggtgtttttcggaatttcccgaaactgcttcagaaatttccgaaatgttgtattggcgaaaaacaggtaccggtgtttttcggatttttcaaaatattttgaaatttttcgaaatgcttttttttgcccagttattgtgtttgtgctggaattttgcactgctcggaaaattccgaagttactttagcaaacttcgaaagaaaagcctgaagttactgtagcaaattccgaagaaattttcgaaagttgtttttgctctctggtaatcactttagaaatttctaaaatatggaatctttccccgtaacgggtgatctaagggtgttactataagtaaccccctccacccacaagctagggttgctggctctattgtttttcttatgccattggcttgggttgatttgagattcactttgagccttgccttctcacttcttcctctgcactgatctacaagcttggttttcgtgtgtacgtgtgagtggttgatttgagtttgtttgaatacatggtgttgacttcgtgaagatttattgagcactcgattcatccccaggaaatctttgttgcatttgttactcttaatggaaaggaaagatatacccttaatggaaagtggatagggtttcaaaagacccgactcattgtgatatcctcaacggagtgtagaatcccctcaaagatttgaacttcgagcacatcatcttacaagaatcccggtgatatctcggccactcatttagctttgatatttggtgcggcttgtagtttagttattgtatgtgcaatcccttccctaattgtgttgctcttcccttttgcttgtcttgctagtttgcttgtaaatctgagatttttggaaaattccgaaaatatttagaaatatccaaaaggtgcttctacatttatttaaaagttttaaacgcctattcaccctactataggcgacatcgaggttctttcagcgcccttccaggacgttggtaggtagcagtagcctatattgattgcctcacaggctcacacagttacacgggaggagcagacggcccagatctcgaaccaacccactcgctgcctcccgtctgattagtcgcccgcacgtactgcccctgcctccgctactttcctcgagcttgttgtcaggctccaaagcaaaagctaaacaatggcgcttgctactacttgggttccatcccccctttcaagctttccacaccaccgcccaaaacccaaactgtaacgtcccacctctcccagggcgggcctagttacatctggcagtttttcttggatatagactgccatcagaccaacacaagtcttttctgcacactttgaccactctgggtccacaccagccatgcgcaactgtgacacacgcgccccaggccgggtccacttgcatctggcagcttttcaaattgctctaggccaagcacgcttaacctcagagttctttggagatcagcttccggaaaaagaagttgtaacttgttggtatgagtattctattaatcctgttaagcccttggtcaggatgtcacacaaaccctcctctccgcagggagcttgcacccgctgctcgcttccccctcctcctcctcctcccctgcgccccgcaggtgaggtgaggccccgatcccacgcgaagagcggccgattcctcctctttgcttgcgccattaactcctgtcggttttatggattggttaacatgagttcttgccttgttcttttcaaatttgggggctgatgcccctagcggatttggggagcggggatgaggacgtgtggaagtggtgagtaatcttaccgagtatgctggaaaccacctcattccgcatgtttctgcattgggctcggtttcggggaacatgggttttatctctagatcccattataatgcatataatgcatatgcatgtaattagtaaatagtgaaagtcataacacaagtcataacacactttaacaatatatataatgcactatgatcattaactttataacggagtatactatggatgagagctacttttctcctcgtgtggttgggctactgaccaacctcctttttcttaccttctctcgaagttctcctagcatgtttaggtaagaaatgttttgttttgagtgaaataaagaagcgctttaactagattatttttagagagaatctatcgtgtgtcactgattttattcccgttctataatatgccattgagtttgttaagttatacacatgtcattgtattttgcttaacatttataatataccatcgccatccagttagactcggttgggtactatataattttgttctaactagaaaaaatgccagtgcattgcaacggtgaatgcttttttaatcttattattgttatacgatttagctagaatgaaattcactgtagaaatttgcttagattttttttaaaaaaatcatgagctacaattaggagaccgactttcatatcaggttagcatgcaagtttttttttaaagaaatttcttaatgacttcttttgtatttccaaaagcaaatgaactaaaaatccgacttaaacaagaatatgtattttcaaaagtgaacgaatttaaaaaactgactcaaatatgaatgacgtaccaaatactggcaataacatctttaatttttataatagtagagataactaaaatatctctgagatgaaaatttccaaaatttagccaaaaatttcaaaatactagcatactccctccattccagacccctcctaagttgatgtatgttgacagggacttttaactatttgccacttttagatttgacaattaactatttgccacacctatctcaatgatatgtgggtccacatgtgtctatgacatgtgggtccagtgacaaatagttaattgccatatttaaaagtgtggtatatagtgcaatatctcgtgttgacataggggtgtccatctcaaactttgcgagtgcatagtacaaataaaaagataaaaatggagtactcgagacgagagtatcttctccttcccctggcgtaaacgaaaatctcccgtctcgtctcctccgctccttgcgcttgcgccaagacgagtcgcggcagccgatggcgagcagagcagtggagggggaaggggagggggaggaggagggggaggggaagggtaacctggtgagcatccacatcctctttcttactcatctctctcactctcccaccgggagtacttatatctggattcttgaatttgcttgcgttaaccctagcttcccttctagatctggaagaagctcttctcctccttaatttcagagcattaacctctcttagtacaagtagtaacagtttgtttgttcccccaataatttgggggtttaactgaccccccctgactcgagcgaggttgattgggttgcggaggatgtggtaatgatgtgcctctgatgctaccacacagattactctttaagaatttgagtttcatatatgaagcaaattagcgaaacctaaaaagcatccatgtttgtgataaaacaagcaactagtaaaatgggtgtgctacctcgagttgttatcacagagtatttgactagttaactatgtgttcaggctaatgcaccggaagacagtcacaagcattgccaaggagaagaattagaaggtatttactctttgctaattgcatgttcatttaagaatatgggaagttcggacctgcattttcccatggagattttcattcatgtttcttggcgtctggattgtaagaagtggcaagttttttcagcagatagccttctttttggacaatacaagtttaaacttcagaaagcattttccttcgttatcccatacagcaaagagaaaaaaaacaacttcctgatatcgctttggtcacagcagcttgattaacaactgatgtgtaaacactctgcagctttgtagatgttattacatgtatacagaaggaccctttcctactattatccttcaaaagtaaatggaagtttgggactttgggtagtacattttctgtttgatagtatgaaactgattaccattcattgatttgccctgatctttttttgttcccgccaattgaaagttaatgggagtaggacattagttatatctctaattcaatcaggagtgctttctcatctatgtacaagtagctagttgaattaaatgtttagtacatgatagtcaattgttgattaaccttgcatccatggattgcataccgagttttaacctctcttcataaaggtcaataaaaattgccacagacattactcaagttttccattacttgtttcattgtctcatcatatttatgaaccctatttactaccattagtattcctatgatcctatctgttcattttagtccatgatgcttattatgaatttgtcaagcagctggccagtcttgcaagataaattatcaagacatcatggacaagtgcggtattgaaatatctgaaaaaagaaggcggcgatggtcaacaaaggaaagttgtttagatttctactttattattttgcttcatgtaattgttgggtttatttatttgttcatcgttatgtccactaacaacatgaaatcaactctgaatccaggaggatgagtcacttattcaaatgattaacatatatgggcataacaactgggaaactgttgcacgcgctatacctggtcgaaatgcacaacaatgcagagtaaggtaattaagtgaaactaaattgtttgattgagaccttttatattttctagccatgaccttttatacttgagttaacagcttggaataatctccacattaaatactgtcttggttatttatgcttaagctttcattgccaccatccacaatggcattttcttattctcacccatttcattgtcaacctagtctgttctgctcataaatatctcgtagcctacatgtcttgattcataagcatgcttgtctacttctaatttgtcttagaaacataaaatccatttcaacaaatgaaactgcatacttgtgttagaaaatatgcttgacatcaaatctctttatggtgcaaattttgtgatagataattagaaacaacaaaatggacatgcatcttgtgtcgatatcctttaagctaaaaaaaattgattccctagttgtggcaataaatggaataggttttttgatgccttctgtgttatttccaacacccatgttacagctgatcttttgtgaacaagaatagaaatatttgttgctactaaaagcatgtcctgaaactttcttactgtacatttctttgctctctgttatcatatatcgactaaaagcctttatggctttgagtagtgactaatgagaattcctatagtacatggtcaatatgcattcagatttcgtgaataatatctgtttattaactaagtatggatggacgtaatggaaatcaggtggaaattcaatctagaccctgcaatcagcaaacaggcgtggtcacgagaggaggagctaagattgattcatgtccaacaaatttttggaaataagtggtgtagaatggctgaacatttcacagggaggtaagatctcaaatatttaaacagatgaaaaatcaggatctcccctgtcctctaattttccctgcactttacctttgtttactttattcagcatgcatctaaccacttcaaaaggctttctgaactaaaattgttaaagtcgcgtacaagcaggacaagtgctgcaatcaaagaacactggagaggtcctatgaaaagaaaattaaattcgtatttagcttcaggattgctcaaaaaatctcctggtctgcctgaaaatctatcagtttcgcagagtagtgactcaaatattcttcagcagtgtgatgtttcatctgatgagaataaactgttatcagatttacgaccaagcctaaaatctaaagaaggggtgagctcaaaatgtgatggttcatcttctgataatcaactgttatcagatttacgagcaagcctaaaatctaaaggggcaagctcaaagtgtgatggttcatctggtgataatcaactgttatcagatttacgagcaagcctaaaatctaaaggggcaagctcaaagtgtgatggttcatctggtgataatcaactgttatcagatttacgagcaagcttaaaatctaaaggggcaagctcaaaatgtgatggttcatctgatgagaataaactattatcagatttacgagcatgcttaaaatctaaacaaggggcaagctcaaaatgtgatggttcatctggtgagaatcagttgttatcagatttacaagcaagtttaatgtctaaacaaagaacaagctcaaaatataaacaaggggcaagctccaaatataaacaaggggcaagctccaaatctaaacaagggacaagctcaaagtctaaacaagggttcatagacctatgtgaaaatactgatacatcagaaggagaaagttctgagttgatatgtacagaaagaccagatcctgattcaggtgaagcttctcagaggataagggatagattgaattggcgtaaaagagcaaggaagaagctggttttcctgtcaagcccggtggagctcaaggtgtctgctgtggcagaatctgaaaggcacttacaggaaagtaaagaaatgagtccagaagttaacatcgtttctccaccagctgtactccaaggtttttcaccagaagttccatcagtatgtgaaaagattgtcgaaccaccactggctgatttcaaccaagctaagaatgtttgttctttggagacctcctcagacccatgcacactggagcaacatctggcgaatgtctcagatcttctagacatgtcatacatcgatggcttgatgatcattcctccttcaggttgcccatacgatggtgatttcatatgagacatgaaaggggcacagacaagtagaccgcgctggtattgcactagcaatccattgtaaaaaaaaacaagaaaaccgctatgctgctgtgcatcttttgatgaacttacatagttcctgtctaattatctttgcattagatcaagaacctatctcgaaaagagctagcaatgttgttctgttagcaatgttgtcctgtgctgcatcttttgaccctccataggtacaatatatgagcatgtggtattgcgacaacatattgtctactagccatattattgcctcataccactttttaagcttcgagggatttaccaaacgaccaagagagcagaacttaaattttgatttactcggtctggttttatgttttaatctggcatatataactatcgatgcatttcatttttgtaagaacctggttattaattagaatacataatacccaacatggctacatttgctatcaggatatatatcctactccaacagaggcatacttgtagaaattaacttttcttttcgagggaacgggcaggagctctgccatttcaattataggagaagagaaaacaaggttttagcatacattgttccaaaaaaccaagggtgacactaagtaatgccactaaaagagaggagaggggcacaggtaatttgagagaatgcaaagcaactaatatcatcaggcgttgtaaagatatgtaatcaaactttgtttcatcgtaggcattgcgcatggtgatgatggaatatttgttgcatcgatccatatgcaccatcgaaaactcgatcatttctttgaagccaaattccccatgttgtgtagaaattaaattcacaaagttaaaacagagatcagatatatcactcaccaaaggaaggtaaacaacatagtatatatttaatattcttcagtcaaatctctccaatgagttcacagtttacacttgtccatccacacacagatgatctcaaatgcaaactggaaatcgatacatatatttagaacagtctccttgagacaatcaaacactatacaaagagctttcagctgatacaatgcaaattacatctcaaggcaatataataatcatataataatggcatgcatctagtacttcttcaaatgaatgatgaacaatacacttaggctctcttcctcctgcccttgatctactcttcgtctagctccagctcgccgccgtcttgtggtcgcagtaggagcccgagcatgctcgacaccgggctgtggcgcgacggcgcgatgacgcggagcacgccgtcctcgccgcggtggcactccgggctcaccgcgtactcgatgtcgcgggtgatgtcgagcgcccgcaggtgctcgcggcgtatcgcctccatggcgaacagcccggcgcgccgcgcctccctctccatctcccgcagcgcctcccgagccttcgccctctcggcgtctcgcccccggcaccgctgccgcaggaggaggagctcgtcctccgcggcggccgcgacggcggcgaggttggctcggcgccccttcgccttctccgggacggcggcctcgcggtgggcgacgccgatcacgtcctgggacttggcgatcaggccggcgtacttcttgcgcatctcgtccacccgcttttgcgtggcgagcacctcctcgttgctgggcggcggcggcaatggtatggcagcgaatcgggctcgggcggcgcgcttcggcggcggcggcggcaatggcgatttgttttgttgacgatgaaccgtcttcggcctcttcgagctcgccgtcgatgaggattcagggcccgaattcctcttcttggaggaggtcgccgtcgcggctgcttccggtggaggcttcaacttcaagccgtcggcggcgacggccgacgaggaggacgtcctcaccgttggaaggggagccgccggcgccggcttgaataacgacgacgaggaagcttctcctccctgaccaccaccaccaccgaacaaaaccccatcagttccgggaataatcttcgtcacctgagatgagaacggcgtcggcggcagcggcgacggcggcggcgacctcgcaaagacctcggcgaccaagagctcgccgcgggtgatcctccacagggagccactcacctcgccgatctccgaccggagacgccgcggatgaccttctcctcctcctccccccgtctcgccgtggcgccgctggccccctcgcatttcttcgtcgtcgtcgcgctggtgccgcctcgtcccgctcctgctgcgcgagcggcggcgcgtcggcatctctctcgtcggcggcggcggcggcggcggcgtgcgcttaggtcatcggagcaaagagagctgaaagagagaggggggcgtgcgcttaggagtagggttttcttttctttccgtttatatcgactatcgagtgggcatgagatcctactcctataccaaataggaaactgacacgtgggggcggaggagcgtgcaacgtatacccacgatatggacacggtaataacgcgaccagctcaacctctttactagtatataaatcatttatgcatatggttctactatatataacactgatgtggccggttcacacttatatataactagggtggaaaaaaagcttgggcttggcttgagctcgcttagctcggctcggctcgaatgccaaacgccaagctcaagcctcattttcagctcgttcctaatatgaatagagctcgagctggctcgcgagccgcttgtttggctcgtgagtctagtctatcgtgtacttatatggatgattttattttctaatgaagttattatttgtcaatatacactttatcatatagattatgatgaattgaatatataaaattattttaattttacatgtcgatgatttgttcttgcttttattaatgattataatttatatatgaagaggtgtttcaacgggaaggctcgcaagccagctcgatctggctcaagctagtggcggatttagaattttttctgagcctaggcaagcctaacgatagaggagtagtacaattaaatctatacaaccacgtacacgatttagcatagatcgagttctaatttatgatgaagagaaccaatgtgcaaaattatatttgatgaaatgaaactagctaattgttaatgttgaatactatacatttataaatatagctagtcactttgctagtttatatgatgatccactgatctgatatccattagaactagttgattaagcacataattagctactagtagtattttactcaacactacgcgactaaacacctgaatttattcctaagcatggtaattatcagtaactaataagtaaaatacactgcggctgcatccagtggagcccgggcacctgacaaggctagttgggccctggctctgccaggggcttgagtcaggaaacgagccaagcggagctcaggttttagctcgttttcttaatcaagccaagcctagcttattgtgagctggcttggcttagctcgtttccactctaatataacagccagatgagaggtgtaaatcatcaaaattttacagcgtttttcatgtgaattggtttggtttcagaaaatgcgaaatgattcaatctctgcattaattgaaatatactactttccaaagaatgcctaaaatatttatgtcaccagccaatttaatttttgacatccgccagaccgtgccatactgttatatactccccacgttttaaaatataactattttttttaactgaatgctgctatacttccgacgcaggcgtccaaccgtacgactcgtgatgcatcacaagctaaaaaaatcatctcgcgtatacgccgtcactgtggtagtagaaaagtcatatcacagttgtgtgtatagcatttttctttttaactactccctctgtcctacaatatgagaatctaaaactgaatgggatattttatattactacgaatctagacaaatagtttgtccagattcgtagtactagaaaatgtcctatccagtactagtttcttatattttgggacggagggagtagtacttcctccgtacgcatccaccaaaaatcttttataatatgggacggagagagtacctagatattaatacgacaatatcctttgcatggacatataaatataaatattattggaacaaagtgagtgtatctatgtactatgtggtagcattctgtattcatcttgtctaaatatatgtacatcacttcttgtaaggcacagacactggcatgcagttttggtggtaatgtctgctgcattgcttatacatttcctcctcggtgtataaattaagtacaggttgtctctagctagctactgtctgaaaatgatatcagttgctatgccgcttcgtcgagaactcgacatcaatgcatcgtttactcatgttggaaggcgagaaacagactgtcgacatttgagatctcaactacggtatttatatgatatgggaatcatcggtaacagagtatatgcgagattgaggtaaaagagatagagacaagaattttatacaggttcggacccttcacaggaaggtaacaactctactcctattggccgaagccggtgttgctttatatttatctgaatcacacaagtatcagagatggcgctagatccccgtcgtcggcctccgcaggcactggatagggcttgcgtaggcttacctctgatgtcgatgtctggcggcgtgtgttggcttgtgtgtctcgtgtctgttgtgtcttgttggtctgtctcccctccccctagggggtgttgtatttatacctatagatgtccccttgtctaagtagaactagggtgaccaatatgcatagacgattttaatagtgcattaccagggatgcaaccattgtccatataaaaacccttttaatagttcatctctccgcttgctgaacaatgattaaaacccataaccgacctgggattttgagaacagcatgcatataaagaacataaatataggttggatttttaagacaagggtacaaatatcacataataaacagagcattgttccattgaaacacctataagaggggaaactcttttaacccacctctaatatctcttgaatagagaaaacccccaaactacatccccggcggtcagcggctgctccaccgataccgggaagacagcgagtgaaccgtgccggcgctgccacgctgctggttattgtggccaccatgaaccagtgcatggccatggcagacgtcccttgtcattaccctccaccttctcctcctccgacgagtccgagcggtaccgaggagtcggagcggtcgtcgtcggtcacaaaggggacgactggatcttgaggtggaattggaagatttactcgttctggaaggcgagaagcacttgttttcttggatcatgacattaattcccttgttttcctggcatgtacgctgggtcatcagaaatttcggcagctcgggaggcacagcaagacacactaccacaaaaatgtgcctcacactttcacacactactacaaaaatacacacaagttcggtactatatatggtaaaagtgttaaaatcggcacctatagatatttcccacctctagaaactgaaaacatatagaaccgacactttttgacaattgtaggtgccgaatctaatgaaaacccaccaccaatatataggtgctagttttttttaaaaaaggcacctatagtatattaaaaataagatttggagagagaggtccctccaaacattttttaagaagaaatagtgagcgtgttggtgattgaacacggaacctccaggtgacacacataataatatattataggtgtcgttcttttaaaaaaatatcagcgctcgaaaaatcgagccaagtcaaactctcgcgctctcccctcagccttatctcctcgctacacccacccatctgtctctcctccttatctcctcacccaacccatccgtgcctcctccctctctctccatctctctcttctcttccatgctttatctatctatctatctatctatctctctctctctctctccatcgcacccacccggtggcggcgacctcccattcactagatttggtgggaggggaggcagcgtgctactaggcggaggcggcgccctccctcgccagatccggaaagagggaaggcagcggcgccctcctctctcttctttcttgtgttgtcgatgtttttgtgttattatattttcttgaattaaatgtaattaaaagtgcggtaaaatctggttggggtgatgggggctagttttttttcattcctgttgggtgccggttaccaaatccggtacctaaagtgttttttatgtagcagtgacatactgctggttgagaataatttttttttactgattttacatgaatatacatgatttaaaaaataaaaatataccactactgtggagtgggaatgtgaactcgtgacgagttcgtacagtgagcatgcgcactcgtaacgtgtttgtaatgtcttcacgagatcgcgcgggtaaacagggaattcggaccctgcatgccgggagtaagaaccgggacgccacaaagtcgtcgcgacttcgtagctagcgaagaaaatgtgagcaaaagcgccgtgcatcaagttcgcatgatggcacgatggattggactcatggtgaaattgcatgatggaagtgcagtgaagttcgtacaatggaagtctgaacatgcgtgtactagctatatacccccgtgagatcgcatgaggggagagtgaactcggagtgagggactactcactgatatgtgggtcccacagaccctcgggcccatatgtcagtgagcattactgctactagcagtactgcagaggatctggattggtgaactcgtgcgccgccgcgagttcgtactctatactcggcgatgacggcatatacttttttttttgtcaattcttttcaaacttttatatttctgtagaatcggtgaaaatattttttttctgaggtgctgtgtccaatttcggtatatcgtagtatttgtgtgcaccttgctctcctctctatatttgtgaaaaacaaaagaagacctcctgcttaattacttgatgcctgagggaaaaaaaaaaggaaaaccagagatggacttctcttttttttttcgcgttagttggcataaattgaagcaaccaacaccgaatatttagtggtggaggtggtataaaatataaataatggctacctttatcgggggctgataagctgctgttcttcctttttgagtattaagtctctagtcgaaatggagtccatttccatttctactggaaatataatcgtctgtagttagaattgaaaacaactgaattattctgtttgagtgccattcagaatttcaaaattgtaacatcatcagcaagaaaccaagttgataagaaacatttttgtcataatcgccagggcaggagaacaaaaattataagggtcccttttttgtttatagaaaaaaacatgatctcttcatcccaaaattaatatagtaacctagtactgataagacacattataatactatgaatttggctaacaaatctagctagataagggttattcagattcgtaatactaaaatttaatatctcatccggtaccagttgttatattttaggactgatatagtaggaaatttgtatgatttaaattctatataaaagtttcctacttgatcaaagattggaactccaacaactaatcctatgaagttgctatggaatagctcaagacaagaaggtttagaggaaaattacctcgaggtccaacatcatagatacttaatatcgcagtactttattttatacttgtattccaatcaatgatttttgaggaaaatttctatgttttttctgttgctgtgttttcttagtccttcgtctcaaagaggcctaagaaaacctaataatgttgaaaaaatatcccaaaaaattgtataagttgtagcttgaaggagtgtacagatcttcagtagaaatacacaggcagctatgcctatgcatatgtgactttgtttgtgcctgagaaaactgtatgcctaagtggcgcacatgcaggagggcacgcatgcacgcagcggggggagaggggcctgagcagtgagcacccctactgcagcccaggccattaattggttccctacgcgtacatgaggcttttctttttaagaaccagataatatattaagcgatagaagcataatacatagtttagcgtacaattgtgagatctgaaacagacatttaagcgcttagcatgacagcttctttccgggtaaacccctcctgtgagagtagtttgcttcctttgcaagtttatccgccattttgttgatttctctcggaatccagctgatctgcaacaagtcaatgggaaaagcattgatgatttgaacccaaaatggttttaagctccaatgtcctggatcttccatgaaatttcgcttggtaactgctctatgaactaccgagttactttcttcagtttttgtttttatatgcaattcatgtgtaattttgtaattggaaaaaggttttctcccaacatttacttaagttgctaccgcttgtgtttttttttctagcaccccctaaattttaatcctgcgttgctactgggcacgtgagactttgatgatttatgcctgacaagtgtatgagagaaacttgttaattagattatttactctgaaacgtatactaaatttaattatggattattttttcttaaactctgaatacatcatgaactaattaatcttgttcagccaacattttattctttagaagcgaaaagatatagggaggtgaacagaacaaaaacaaacgaatgcaacaacttacagcaagcagcaaggaggatggctaaataatgcaataatcactgatcaatcactcagtctaaccaagcgtgtgtcgcatgctgcagctcacgcgacctaaatccatcgcctgactcaggctaataaactggcaaaagaacccaggccaggcattgagcagttgagctcagggagccaaccaaacacacgctccaggcaaaagaacccagcaacttcacctcgaggtagcaaccaaatatataaccccttagtttaccgtcatccaccgattccaatttaaggtacgactaaacagagtcaaaatttccgaaatcaaatccaattcgttgattcctacataattcttgcatccaaacaggctttattcatgtcttttagaaacactagattgcttatcactgacataaactgggtgtgcacacgcatatataagaatacactctcttattacacccatctaaagtctaatctatcgatggacgctaaaaaattcataataaacttataaatttcctactgaacactatacatgtagaccataaacatgggtaataaatcttctacagaacaccatacacatgaaagcataaataaggatatatatggcagacatacgattttaatagtgcattattagggatgcaaccgttgtccatataaaaacccgtttaatagttcatctctctacttgttaaacaatgattaaaacccgtaaccgatgtgggattttgagaacaccatgcatggatgtgcacttatcacttatcactggcgtacaatggatgtgcataagcatatataggagtacactctcttattacacttgtctaaagtctaatcgatcaatggacagtaaaaaaatccataataaacttataaatttcctactgatatatagaccagaaatatgcgtaataaatctctacaaaacatcatacacatgaaagtataaataatgatatatagtagcggatgtgcgattttaatagttcttcattattagggacacaaccgttgtccacataaaaacccatttaatagttcatctctctacttgctgagcagtgaacaataactaaactcataactgatgctagatttttaaaacaccatgcatataaagaacctaaatataggttggatttttaagacaagggtacaaacatcacagaataaacgaagcattgttccagtgaaacacctataagaggggaaactcttttaacccacctctaagatctcttgaatagcgaaaccctcaaactacatccctggtagtcagcggctgctccaccggtaccggaaagacagcgagtgaatcacgttggcgccgccacaccgcttgttattgtggccaccattaagtcatgaaccaatgcacggccatggctgatgtcccttggcattgcccctccacctcttcctcctccgacgagggatagtctccgacagcagctccggcgagtcagagcagttgtcgtcggtcacaaaggggacgactggatcttgaggtggaattggaagatttactcgttctggaaggtgagaagcacttgttttcttggatcatgatattaattcccatgttttcctagcaagtacgctgggtcatcagaaattttgacagcaggagacacaacaagacacacactaccacaaaaatgtgcctcacactttcacacactaccataaaaatacacacaagttcgatactatagatgatgaaagtgttaaaatcagcacctatagatattttcccacctctgcaaactaaaaacatatagaaccggcacattttgacaattgtaggtgccggatctaatgaaaaaccaccaacaatataggtgctggttttttcaaaaaaaacatctataatatattaaaaatgagatttggagagagacattcatccaaacattttttaagaagaaatagtgggcgtattggggattgaacacggaacctcagggtgacacatataatatattataggtgttgtttttctaaaaaataccggcactcgaaaaatcgagccgagtcgaaccctctcgctctccccttggccttatctcctcaccgcacccacccacctctctctcctccttatctcctcacccaacctatgcttatctcctccctcactccctccttctcctcctcctccatgcacctctctctctctctctctctctctctctccaccgcacccgaccggaggcggcgccctcccctctactagatctggcagagggaaggcagcgtgctaggcggcaacgacgccctctcctctccgccaaattgagagggaggggaggctgcccagcggcgccctcccctccgccagatctggggcgccctcctctctgctccccttgcttgtgttgttgatgtttttgtgttgtttcattttcttggattaaatgtaattaaaagtgcaatgaaatctggttggggtgaaggggatcttgctttttttttcattcctgttgggtgccggataccaaatccagcacctaaagtgttttctatagtagtgatagaccgctgaggtgcaaataaatttttttaaattttttactgattttaaaaatatactgttactgcggagctggaatgtgaactcgtgatgagttcgtaaagtgagtacgtgcactcgtaacgtgtttgtagtgtcttcatgagatcgcgcgggtgttcatggtagttataaaccaatttcgactatcaatacttccaaaattaatggagaactagcaatgcttccgatagggactatgaatctcaccaatgaattcagatagggattgttcagatttgtagtactaagatttgtttcatccggtactagttgttatattttaggactgagctagtaggaaatttgtatgatttaaatcctatataaaattttcctgcttggtcctttgaaacaaagattgggactccaacaattctatgaaattcctatatatgaaatagctcaatactagaagatcttagaggaaaattcatatgttttttctgttgcggtgctttctcaatcctttgcttcaaaggggcctaatcaatgttgaaaaaaatatcccaaaagtatgtataagttctagcttgaaggagtgtacagatcttcagtagaaacacaggcagctatatgtgcctatgcacatctgtgactttgtttggttagtgacctgagtatcgtgcctgagaaaattgtatgcctaagtggcacatgtaggagtggacgcagcagatgcgcaagaggggccagagcaccccctatacgtacatgaagctaaccagcaatgttgtagtggcatacatgagtgccacttaatatttaggtgagttctgaataatattccttcgatccatgtcattcattgctccatttcttctatataacgttgaggtttagtatttagatatcactgctagaattccatgggttacctagaggcaaatacactagctagggatcatataaatataattctagggaacatatttccctagagtttaccttcacactgattttgacaatatcaatatatatacaagcgattatcaatgcatgtttatcggttggtaggactgctctacgaattaccgagctactttcttcagtttttgtttttatatgcaattcatgtgtaatttgcgattggaaaatgtttttttctcccagcatttacttaagttattaccacttgtgttttttttctagcaacccctgaattttaatcctgcgttcgtcactgggcacgcgatgatttatgcctgacaaggcatatgcatgagagaaacttgttagattatttagtctgaaacactaaattaattatggattatttgttaaaaactaaaataatcatgtattattttttcttaaactctgaataaatcatgaactaatcttgttcagccaagaaactgcctatatatgcatacgtgactttgtttggttagcgacctgtgcaacgtgcctgagaaaattgtatgccttagtggcacatgcagcagtggacacagcgcgggggggggggggggggggggggcaagactgtatgccttagataatacctagatatcactgctagaattccatggcttcccttagctagacccaaatacacactagctagggatcataaaagaactctagggaacatgtttcccaagagttttcctttcacactgattttgacaatatcaatatatatacaaacgatatttatgcagtttatcggttactttcctcagtttttctttttttttgttttctttgcaattcatgtgtaatttgcgattggaaaaatgtttcctcccaacgtttacttaagttgctaccacttgtgttttcctattaattacgccctaaattttagtactgcattcgcattggggacgtgagactttgatgatttgacgaggcatatgtacgagagaaacttgttagattatttagtctgaaacactaaattaattatggattatttcttaaaaactaaaataatcgtgtattatttttcaaactctgaataaatcatgaactaatcttgttcagccaacattttattctttcgaagcaaaaagatgtagggagctgaacagaacaaaaacaaacgaaggcaacaacttacagcaagcagcaaccaggatgtctaaataatgcaataatcactgatcaaccactcagtctaaccaagcgtgtatcgcatgcttcagctcacgcgaccaaaatccatctcctgactcctgtttggggagtttaagattctgagaagcagctgattggtagccagcttctgagaatctggaaaagctgggttcccagcttctggcttctagtccattttctaaattctacaactacaacttctcagaatctggactaaaagatgaactgtttgggggagcttctgattctgggagaagctgcagcagccagaagctcccctaaacaggtcctcaggctaataaaccggagaaaaaacccaggcaagctaagaccttgttcggtttagaagggatcaaagagaataggaggggattgagggaaaataattccacatcacaataggtgtggcataaatcccctccaatccctctctcacagagattaaccgaacaaagcctaagggagcctaccaaaatcacatgctactgccagacgtatggtagaccagcaacttcaccttgagatagcaaatcaaacaacccattagttcactgtcgttcactaattacaactaattccaatttaacgtacaactaaacaaagccaaaatttccagaatcaaatccaattcattgattcctacctgattcttggatccaaacatgctttattcgtgtcttttagaggtactagatcacttatcactgccatacaatagatgtgcacaagcatatatatatatatatatatatatatatatatatatatatatatatatatatatatatatatatatatatatatatatataaaagtacactctcttattattacacttgtctaaagtctaatcgatcgatggacactaaaaaaatccataataaacttataattttcctactgaacactatatatattagaccataaatatgtgtaataaatcttctacaaaacatcatacacatgaaagtataaataatgatatgtagtagcggatgcgcgattttaatagttcattattaaagatacaatcgtcgaccacataaaaacccatttaatagttcatttgtctacttgctggagagtgaacaataactaaactcgtaactgatgccggattttgagatcaccatgcatataaagaacctaaatataggttggatttttaaggtacaaacatgacagaaaaaacggagcattgttccattgaaacacctataagaggggaactcttttaacccacctctaagagctcctgaacagcgaaatcccccaaagtacatcgccggcggtcagcggcggctccatcggtagcgggaagacggcgagtgaaccgcgccggcgccgccacgccgctggttattgtgtccaccatgaaccagtgcacggccatggctgaagtccctcggcattgctctccactgcctcctcctccgacgagggacactctccggcggcagctccggcgagtcggagcggtcgtcgtcggagagagggacgactggatgttgaggtggaactggaacatgatcattgtgccacatttcaacaattgccgcctccaaatcgagcagccatgcgaggttcaccgtggctgcatgaggtccgatattaataggtataggtcgatggatcgccgccgtgaacctctccttccagctcatctccggcgattcgtcgtcggcgcggacgactccggcgaaccgccgcgcgtctaccacgtcctcgtacatgggcttccagagcacggcgtcgagctcggcgacgaggcgccggagcgcggtgcaggtgcactccaccaccatgaggtcctcgccatcctcgagcctcgacaggatggcggccatggcgtcggtggggagcgacaggagggtgcggcccagcggcacgccgctcctggcgcacaggtcggcgagggcgcgccggacgagcccgtcggtgagcgcgccccagagcgcgcccagcgccgggtcgcgcctcagcgcgcgcgccgtggcgtccagcccgccggcgaggagccgcgcggcggcgagcgcgtccacgcagaagcagtacgcgtcctcctccgccacccacagatccgcgagcccgtcgacgcgcacgtagaagacgaggtggcgccgcccgtggacgcgcagcttgagcgcgacggcggcggcggccgcgtccggccggtgcagcagctgcggcgcggcgtacctgagcgggagcgcggcggccgtcctccccacctccgacgggagcctgacggagttttcttggtcggcggcggcgtcggcggcggccacgaaaccggcgtcgaggaaggcggcgtgggcgaggatgatgaggcggccaaggaggcgctcggcggcccaccggccgtcgtcgataaccttgtggaggggagagatcttggccatggcggcggtcggcggaacgaaaatgcgccgccgccttgagggttgtagatgtgcgagggtttgtgaatttcgtctggttagaaggcacatttgggtccttttgtagtcaagaaaattaattttgataaatcaaattaggagaaaatcaataattgggtgttattatgggtctacttaatttgcatgtgaactggttattgcctagaaaaatttggtatgttctaacatagtacatttttcccgcacagtttttccgcggagcgatttaaaatagttagttctgtttacatgtatatatatatgatacaatttttttttctttttggggcaggtaaaaaaacgccccgacaaattttattaagactatgatgataatttatataatacagcaaatatggttgttatggaagtaacccaatcctaaacaagaaaggggttttaccggcaaacgacattggggtgacacaatcaaaatgtaattaaccgttatgtatctcttcgatcatgatgctttcaaaaccagcaatatgtcatgcccaccgttcttccccaatacacaccaatggacctccatggcagatttagtgattcccgcgatgatcctgacgtttctctccttctaaatcaaccaagtaatcaagatcgatcactcctgcgtgaaaaaaaaaaaaactttccgttgagccttttgcatggcagcctgaggaaaagtgccaccaaagcttccattttttatgacatatacgggttctgaacagagtgtaaccctgtgaaatcgcagctggccatgaaaaaatgatgacaagtttctggctcaacaccccacaaagagaacaacagacttgttcatgcggtcaaccaagtcgcgccaaattttcagctgtcaagcaaaactcccgaagagtacaagatacaattttgtttgacgaagcatatagctaggctcttgtcatgctataccaagcatgccatgtcatcaatgtttgacgatactgatgagttgatgtgataagagccactttacatttcacataggatatacaatattttttgttccgtcatttctccattccgaaaaaacatgttcctcatatcgattgacaaacctgcacctatgatgagttgatgataagtcgtcatacatttcgtacatttttttcctgccatattcgtccgttccttaaaaataggttcatatcgattgacaaacctgcacctatgcttgagatggaagatgagaaagcgtaatggcaatcttactccatcatgctactcgtcttccacaaacatgctattcactgatatgccactcatggaccgcctttagatgaaccatattaagcaaaatcttattcatcccctctattctatgacaaaccctaggcccaatgatctggcgacgctaatgaccgatcaccatgtattccggcaaggcatagaattcttgggtctgccactgcctcaatgcttgaaaaatagtggataattaacctcctacctaactcgtgcctacacagttgagaagaaaggatataaagtgttagactttagagcatggtctaaggtagtactacttttgtttttttaatgtataacgtcgttgactcttttagatatgttttaccgctcgtctttttttttcaatttttttgtggaaatatgaaacaaatataagtcatgcttgaagaacctttaataataaatcaaatcacaacaaaacaaatgaaaatcacataatattttttaaataagacaaatgatcaaacatatctcaaaaaatcaatggcatcgtatatttaaaaaaaacagatagagtacatgtatatcatgagctcatggttgttcactttacaagatgtaatcttttatcttggatgtaagtttgaggatatatttgaacttttatctcttggatgtggtagaaaaaaatccataaaatagaattaagttgggagtttgaaccttggtaatgagagacaaaatcctctatatatggttgatctgaccgtttatttcgatggttagttttgtaggatgtccatttgtcaaataagttttgtaaagggttcaaaatgtccaaaacaccaggcccaggcttacatccaaaagaaatttaaaacaagaaactgtatccatttattactgcctataatcgtccattctcctactaccactacaaaacttgtgtattgcatggactattatttttagaataaaatatttatgttctgatcgtatataaaatgtggtagttagattaaaattagaagagtcctcgctacaagggttctagcctttgacgagacactttcatcaagaattagcgaaattccgtcacaactagtagtagtattttgtgacaacctagcctgtgacgaaaggacaccaccgcagaagctttgtttgggattaccttatgtgtgcaaaatgctgcatctgtcaaatggttgcgacgatttctccgcccgtcgtcaagaactaatgaccttccagattgtcaccgatcaaacaaaaaacttcacacaccggttgagacggtggtgccgcgtggacaagctgatggcatcaatacaacatggtttaatttgcagtttgccacacgctgacctgacaaaccgttcttcactaatttattttgtcataaataaacaaccggaggcccagcatatgagggagccgaggcccaaggaactttatgccatggcccatggcccaatgtatggtagaacgaggcccaactaatggtgggttgtgtcccaaattaggaaaaagtccactttgactcccttaattgtacgccgaatctaattcgtacccctcaaccagaaaaccggatagaacgactccccaaactattgaaaccggtgcaatttgactccctcagcggtattggagggcggttttgctgacgtggcgctgacgtggcggtgttgacctggtcttcatcccacgtggcgcttaagtggcattagaattttaaaaaaattatgggacccatctgtcattcacacaaaaaaaatatatattgtgggacccactgacatgtggggcccacatgtcatcctctctctccaacccttcttcctcctccctccccctctctctcccccctttctctcccccttccccatctgcggccgaggaggccggagacgagaggggcggcggcgggcgggcgagggcatagacgatgagaaaggcgaagaggaggttggcggcgacgcccacggagacgacgaggaggcggtcagggacgggaaggttgcggaggaggtctaggttgtcgggcgcgaagtcggagtccgggtcgtcatcggggaggtggcggcaaggaagtggcttgactcgtaacgaggacaatggtggtgagggcggaggcgacggactcgacgctggcgaggaggtcggacggggcggcggagatggagatgggcctggaggaggaggaggggtggcggtggcggtggagggggaggtgttgcccgcgtcgctcaccgcagtctccgcttccccgacatgtcgtccccaccgccgcagcggccggcagctacggctgcgcccccctccccttccccggcgtgcgacatccccgcctgcgccggccgccactgcctccccccagccgctccctcgtgccttcctcgccgccatggcctcctcgccccaccgcgcccccgcgtcccagacatgtcgtccccaccgccgatgcggccggcagctatggccgcgcccccctcccctcctccggtgcgcgacatccccgcccgcgccagccgcggccgcctcccccagccgctccctcgtgccttcctcgccgccgcggcctcctcgccccactgcgcccccacgtccccgacaccggcaccgccgctcccgcccttcaccgacactactgtccgatggggaagagaaaaagggagagaaaagatagagaagggagatagagagggaggaggaagaagggttggagagaaaggatgacatgtgggcccccacatgtcaatgggtcccacaatatattgtgtgtgtgtgaatgacatatgggtcccacaattttttttaattctaatgccacttaagcgccacgtgggacgaagaccaggtcaacaccgccacgtcagcaaaaccgccctccaataccgctgagggagtcaaattgcaccggtttcaatagttcggggagtcgttctatccagttttctggttgaggggtacgaattagatttggcgtacaattaagggagtcaaagtggactttttcccccaaattaccgtgcgccacgagcccacaacccaacatatggtgggccctatgatccgttggctttggaccaacataaggtgtgaaatgaccttgatgtcacctagagtatggtgaataggcatttaaaacttttaagagaatacgaaagctaaactttacgaatattccaggatatttttggatattctgaaattcctcgtgaagcaagctagcaaggcaagtaaaaaagggatagccacacaaatagcaacaaaactactaacggctctaaatagcaaagctagaagagtgagagagatatatcaccaggattcttgtaagatggtatgttcccgaagttcaaatcctctaggggattctactctccgttgaggagctcacaataagtcgggtcttttctaaccctatcctcgtgaggttgcacaaatatactcctcattccactaagtgtatctcttttcctttcagaggtgagatctaaccttcacatccctcagcacaccacaaataaatcggtgtctcgagattgactcctagccatctaggtgtcctcaaccaccatgagtaataaatacgactaaaatttcttcaggatgaatcgagtgcttaataaatcttcatgaagtcaacaccaagcactcaaacaaactcaaatcaaccactgatacacacgaaatccaagattgaagattggtggagtaggtgagaaggcaatgctcaagataagcaattggaccagcaaccttgaattgggggtggaggggctatttatagccacttcctgagatatacccgttgtaggcaaagattccattttccggaaattctgaacatcataaaattttagcacgaactcagccaaaaaaaagagggaaaattacatttcaaaaatatttttggaaaaaatccaaaaatcactagagaactttttcacaaattttgcaattcttgaaatttcggaaaccgttttcggaaaattccgaaaatcacataagagctaaatcaacttacaaaaattcaaaattctgaaatgcactttcggaaatatccgaaaaacactagagtgcaatttgtggacatatcaatttaggaaattctgaaaagtactttcatgagtatttaaaaatcatcagagagcatttttcatggcacggccttttcggaaattccaaaaatcaccataatgtaaaatccgagaatgagaaacacttcaatgtgatttttgagcaccaaactcattcctataactcaaagcaacatccctttttatagtacggctttcctaccaactcaagagcaaatagaaaagctataccaatacaaatatcttcacatcatcttctttctttgccttgatcaatgctattatggcttttgacttgatgttcatcaatgaatcacattatcttgatcttcgacatttgatcttgtgcttcttcttcaccaaggattgatcctcaacaacgtgtgacatcccatggcctcgatctgttcgttattgttcggcaaagcatttgctccttcaacactacgtcggatccttcggcactagccgatgcttgcccttctcccatgtccatcgtatagccaagtcttgccaacccttcaccacatcttgccatcttctattacttgtagccttggatcacaatggaatatgtttatatcacatcttcttcttcattatcttcatcggctcttcattggactaaccctttccttgtacactcaataagtgcattagtctgttaatcgttcatcatcaatttaccaaaacacacttggggcatatacgctctttcaaggtggatgtggcccactggaccgtgcaccactacccagcatatggtgggccctagctcatcaaagaggattgttgtgtcaattacaacttgataattattaattttaaatttcaaattaatttaagaaactactaaattaagggtccaagatggtacgactttattaatattttattttttgaaaatttaataattattatgttttaggatatttaacactacaacgttaatggtagtaaaaactaaaaaatccacgatattttcaatagctgattttattctaaatttgattgatacactcataataattaaatccaactaatcaatagatcattttaagactcaaaatacctctccaaagagctaaactagtataggaaaatttgatatactcaaaatatatgttatttaaataatattttatgctctactacacacaataaaaaaaattcttacttgcaaaattttaattctattttttaattcattagaatttatagagttaagatttaatttattggtctactcatcatgaaaacagtgggcacgtgaaaagtaccccacatttcatgagaaattgaattaaataacaaattaatggttggcgcaaaccttcaaaacaatgtaattcatacgataacagaggtatctgtaaacagtcgttaagtgccgctatcgaccttcaactatcaaaataaataaagggagaactaacatttcttacacgtatattatttataaatgatgtagttctacttctattggagaactaatacggatgcaggaatcatacactaaagtgaaagagaaatagctggcatgcgaagaaacacacctccggcgaatcacgtgcgagcacacaaattgatgagcccataagtcagatcaaaccgacctaaagtggagccaaatcactacgaaatgccataggggcccacatgtcatccccttgtgaaaggcggttgagaggggtagggcctagggccaaaccgacctcacctcctctcatatccacgatccacgtgtcactccctcagccactctcaatagcggttatgcgtggatcccagcctccaaccgccatacagccatcattacaaggatataaatagggatgagtttctcatgtcacaacatacacttcaagcagcaattctctcattccacatatattgtattctctcaagtagtaggagagttaggcttagaatagtctttgttcctatagtcttcttggagattctggtatatttttaatactttactcttcttgtaagactatagttgcaatcaagaaattatcttctttacttattagtgttcacagttcatatactagcttcaccggtttatacttcatttatatgcttcacctgattaggctacgagattgctactgggcgagcgatcgcccggggcgatcaggccgatcccccctcctccctccacgtggtttccttttttggtaccgcattactttcctattttagtaaatttatgcacctaaagtttgtacacctcaagtttacacatctaaagtttagagacccaaagtttataagtcaaaaatttatatatccgattcaaatttgaatttgaattcaaatattttttatatatagtatttctatacatctaaagtttatacacctaaagtttatagacacaaagtttataagtcaaaagtttacatacccgtttcaaatttaaatttgaattcaaatattagtttatagacccaaagtttacaagtcaaaagtttacatacccgtttcaaatttgaatttgaattcaaatattagtttatagatccaaagtttataagtcaaaagtttacatacccgttcaaatttgaatttgaattcaaatattactttatagacccaaagtttataagtcaaaagtttacatatccattttaaatttgaatttgaattcaaatattttttatatatagtatttctatacataaattttttcaactttttttttatttttttaaattttatggtgtactgtagtaggaagggaagaagggaaggaggaagggggagagagcgtataggggtataggggagggtcgagcggagcgatcacccacccattaggtgcacccattaggctagtcaattctatactacggtaatggtcaaatgaggttgcacaagttctaacttagccatccaaagggtgagagtcccgggggaattagtcacattatttatttacataagcatggtggttaggttagttaaatgtcattggatgcaggtatgccccacaaaattgaggtaggtggtaggtggtgacagtcttgtttgtcctttgtattcctccatgtctggatatgtaggggttcataaaaacgctataaacacactggaagaccaatagggagtggtctctcagtagtacatgggtgcctagaaataagtcctagcttaatcatgaaagtgttaagtgtaaattaaatattagtaatataaaagtacatatgaaccttagctctctacagttcctctccactgcctagtgtgtatttattagagacgcatctcttgtgtgtcacactacccactatcatttatcaattaacccatgttcagactatgtaatatgattgtaacttgattaaagaatgtatgaactttatctttgcaccgtcgccctcccagcggaaatataaatatggtacccttggaatactcctagatgaaatactatagtagtatccgtgcacttgctgatttatttgtgaccgtaagaaatatcaactgtatgctacggcaatagatttttttaaaacaaaaggcacgtacataagccgaaagaaaaagaatgcgtacttacgttggagacagattagatgggtttgcaaggcccattaggacatgacattaaataatagagattaataatatacagttaacataagatgttttagttattcaatggtcaaatatatctgatgtcgtgggaactcgtagaaagtgtctaattaatatatgtataaatattggtagatagagtaggtaggtaggtagaaagatatgcctcatcattggaaattaataaatgtatttgaagacaccttgtccatatccttttcaaatcataaatgatgtgatatcatcatatcaatatataaatgcaacaagataataataagaacccaagcattagtacacatttaatgcatttagtggattcattaaacattacgtccaaatccagaaatgcattacctgctataatttctaccaatatgatccgtcccatttttcatactacaaatacacccatgttcctcgttagtatgtatcatggaaacatcactaactacagttctccacttcagttcactagttgcattgtgttacgtgattatgagcaattgaggcaatggaggaggtggttgttctcatcatcggtgcggggccggcaggcctagcgacggcagcatgcctcacattgcaacatgtcgcctatgccattattgagcgtgagtcatgcaccgcatcgttatggcgccaccgtacctatgaccgcctcaaattgcacctcgccaaggaattctgcgagttgccacacatggcgtatccctctggcacgccgacatacgtccccagggagagttttgtggaatacctagacagctacactgaccgatttgggatccaaccaaggtacgatacctctgtcgagtcagcaacatatgatcaaggaaagaagcattgggctgtgctagcacaggacactgacaccggtgttgtagcaagactcactgcacggttcctcatcatggccaccggtgagaaaagcgcagcaagcattccactagtccctggcctcgccgggttcgagggagaagctatccactcatcagcgtacaaatccgggaatggctatactgggaagagtgtgcttgttgttggtgccgggaactctggcatggagatcgcctacgaccttgccacacatggcgcccacacctccatagttgttcgcagcccggtatgtacatcatatttattcatcttgcatttatgcacttcattttgggttctgattctttgcaaggtagactatctaagtagtgttgaaatatggtagttccattatgcatatataactgggaattatcgatgtagtacaaaatttctcaacgtttaactttatttctatccaagaatattattatctatctctatgtatattatccaaggccgacttgttctcactttctagctacatattcccccctaaataataatggtttcatggcaacttgaatgcaggtacacataatgacaaaagaactaatacgttttgggatgacaatggtgcaaaatctaggcctatcagtgacaattgtggaccctcttcttgtaatggcagcaaaattaattttttgggacttgtcaaagcatggaattatgaggcctaaaatgggccctctcttactgaagtcacaaactggcaaatctgctgtcattgatgtcggcactgcaaaattaatcactagaggagttatcgacgtaattgtgcatctactcttaagatataaaagtaaattgcttggtgatagtgaagtttttagcctcaattgatgtgacgaaccttaacaccgttgttttatgtatttattaggtgctcgaaggaatattgaagataaatgcaaacaatgttgaatttcattgtgggaggcaaattccatttgatgccattgtgtttgccacgggctacaaaagcacagttaatacatggctaaaggtacaaagattattggtagtttttttttcaaatctcttagtttagacaataatattgttgtagcatacatcatttttttttcattactgcaaatggataatcctttttttgctgttgtcagaatggtgaaagcatgtttagaaatgatggttttcccaagaaaaaatttccaaatcattggagaggtgaaaatgggctctattgtgctgggtttgcaaggagaggattggtcagtattgccatggatgccaagaatattgttgatgacatcagagccaccatgtatcaagtgtcttgctaaatttggttccttttgtttccaaaggatggttaaattagcttaaacatggagataaggaatgactatgtttggacaacttatgcctattaaaatccaactttgttatgcaaaactagtggaaataactcgattggcttatttagaagctattgtagaatccttccatttataatagcttgcctctttatggaaaaggtgaaagataagtgtatcaaacagggacctaagtactttgttcctttattgatacggcttgtgtctttgtatggacagcttgtttgttacaaatatcattctaaacaatgtttaattatatgttctaaacactttatttagtttagctgattagcactttgcatggtttggagcatccagccatatctgaatgtgcatattcaaattttcaatttttttgaaagttgtctgacctgttgtagtttgctttttttttactgatgcataatccaaaactactagaaatacaaggtataaatccattatgatatatatggtggagtaaagcggtggacaagtaaaagttaaaattattacaatggcagaagcagaaaagaacaaagggctactgaattaaagaaaggagaaaaaagatattcacgggggcttgaaagaaaattcattttgttctaagtcttctaaaattaggtttacaacctcttctacactcctagaattcccttggaaaattcttgcatttctttgtatccagaagtgccaccatgttgtgatcaaagttcccaagttgcatcttgtttgtcttggtgttccattagtagagatggtgctaacccacttagtgatagtttcttgtggtggagtctttgtgattcctcttaatatagagatcgagctccaaacttgtcttgtgtattcgcaggctctgaatagatgatatgtattttcaaaggcgtttgtgcacaaagagcatatccaatcgcacggccaaagtctaattaggacattctcagctgtgagggccttttggtgcatgattaaccatcctagaaagcgttggtttggttgcgcatccgaagaccaattgtacttgaagattgggttgattgtggatcctaagaacttgggtgttgattgctgatcctaagaactgtgcttgctatgcactttttgttgagaagtttcttgatgagctcattgtccagactatatcatcctcaatgtcttcagcaagctggatgcaggtgagtagattgcccaattgaaccaattcgtggagtgtttcaacatttgttatttgtctaaaggaagtgagctaggaattgttgtggatctcaacagagattgttctgttcttctttatcgccagattgaaaagatttggcaagtctttgggacattgaccttgaagccaattatctttccaaaaaaatgtttttttaccatttccaaggaagatctttgtgcatgcatggaagagtttgcgatctacatcattgcagcgaagctccattgaggcccatagcctagaatcgtctttccatttgatcacgtagtgctctcgagaatttttggagatccagaattcccagccctccaaggtcttttggtcggcaaaccatttgtcagttcagcaggctatttcatgagtgggtattctccggttctgttcctttccagagaaaggcgctcctcaattggtcaatttttttatgatccacttcagaatttgcaaggaagttagctagtaaattggcattgaagaaaggactgatttcacaagggtttttcttcccactgaggtatagttgcgccctttccgtccttgaattcttgatccaaatttttccaacggtggtacaaagtcaatcttgcatagctttcttggatgcaagggcaagcctagatgagttgttgggaaagcatttacttttccagggaagctttgtatggcacgttcaatgttcaaatgtgcacacaaaatggtggggatctcagttttctgaatattgttttgtagccctgagactttaccaaagagagctagtagggtctttaggttttcaatctatgattggagtgctggtcttatgaagaaagctacatcatccgcgaacattgaaaccttgtagctgaataggtcaatttttttcccatttgttcagttcaatcaattgaagaagccgtgcaaatagtttagaagagtctggaatctgaatattttctttattattttttcactaatgcttctcatatttatcataaaattaattatgccatgtggtccaatcagctgttagttttaccaccgacttgagatagatagatagatagatagatagatagatagatagatagatagatatatgtcagcccgaaaacttttccatgttaatccccaaaatagtgaataaatctagtcatccattaaggggaccaaggcccaaatggttcaaattaattaagataagagtctgtccttgttacaagtcgatgattttcaatttcgaaactagtaagttatgaaaatactatgattgacactcaagattgaattcagcaactgactaacagcagccaaaaatgcagcaactggactgcaaaactcatggtcagcaccacattactgtcgagtgccaatggtgagttgacacaatcagtgtttgctagctaggaaaggaattttgatccacccgtatgatggcattttcataagaggaattaattgcatagagggtcagttacacgaggtaaaataggcaaaccgcaagcactcatccagcttaattaggatagaaagggatgacatggcctcctcatgtagcagaaaattagctttagttaaagttcgtggggatcaattgtatgggttttatcttttatgagatacgctaattgaaaataatgaactatgtattatctaagttaagtgcatggtcgtacaggaacaggggtgggactagagtatacgaggggaatgcccagaaacttcggtcaagaaaacttttttttaagctatagctttcatatttttactatgtgtacacccatctcaatataaacttaggcacctacataagcttaaattcggtcaaagtaaagtaaactaagtaagtagtaccctctttattttgttccagtccgtccctaatagaaatacaattgactattgcttttctcctgtatatctttattttattttcattgttacagcaagatatacttaggactttcaacggactcgggcttgttcagtttttcaggagtatggtactccgttaggaaaaaaaacagggaaattatgctaggttaatagaggaaacaccgtatagagagacaggatgggacatactcgattttttttttgtctggaaatatactcgaattgggattgggagtagcaaagatggggataactggataagttaagcgggactggtgtagattaggacagcatagggaatagccgtgcaagggccatagaacttgcctcctccttcttcttcttcttctttatgtagtaataaagacagaattttagtctcatactttttcgtattaaatagatagcgtccacggatattatctagataattccttacatgtccctaggttttcgttatgtgtcttatatatatgtcctcaagtttatcctatacataccgtcgagttttcgtgtcgattcctgttatgcccatttcagcaaagttgtctattagaaataactatactgttgtttgctcaaaaaaaagtgctagctagattaaagaatttcattctcaacatgagaactatttcagtttaaaaatcgtatgtaataaaattatttaactccaaacagtttaatttttttttaagttttgcatcaaacagttttgttcctctggttttatataattattttttcaacttaaaaagtaagtttttataagaagctaggacttataaactaatgagaggcaatatagtgttttttcttaacaaaaatatagtggtttactcaaggccaaatgacagaatgagtatagagaggattaaaacggggcgtaggccggtgataagacaaactcaagagtatggaagatatggaggggattgaaacgggggtatgcaggagataagggaaaacccaaaagcaagagcatgaaagggaagggatagagcgaaaactcagagagacacgaggaattgtctgtattgcattataattaaagtgtgagagtgtatctcctaataaattagatagaggccataaccaatacgcatattcctcataaaatttctaagcataagttgacttgtcaatacaaagttttggccactatgtatatatctgggtcaaccattcataattgaaaaaataaaggttaatcaaacatgtggtgcaagaattgtctccacctgtcaaaagtttgttcgtattaaattttctttttatataacatttttgtcatttttaatcgtcgacatagtggttatcctatttgtgagactttgatctataagttatttttctggtatgttcatgtttttctcatatatattatgaatttatttgtccttaaggattgatgtttacagcatatataatgagcaataatatgcatgcatcgtccggactgccaaccaatctagccacgaaatgcgaaatgtgatcttgctagtatactaaaaattcggctaaaggtggcgctagagtaaaaataggtaaaatgtatctacactactctgcaaattagtggtggtggcaatgaatctatgaccactatctccattattaacgtattggttcttcgtgttggtgaaacccacatactcaataaatttaaacgtttccaaaagaacaatgtctaaaaaaaataatgttcatattatttggtaagatctccagggaaaattccatatagctaaaggatatggaatgagtcaatctacatgtccttcaaatgatgagcgtgcaataatatacagagcacgattcttttttttcaatgaagcgcataggtaatttactagtatcttgaaatgcaagtaaatttgctctattatccaagtaagtcacacagaagttgatgcgatcatactacttggatttgtcgcgtcagttctttctagataatagaatataacattccgaccttttctcaaaagaactacagcccattattacagtctagcactcaaaataagcgtaatccaaaaataatagcgaccagcatataaagataaaaataaccaataaaatatatggagaacacattattgaagtctatttgagaatctccatccataattggtaaaaagctacataaccatcgactcaagctttctgcatgcaatttctaaaagatctccatcttcatcagacctttgtaaccatgcccaaaaccggagccaatatgttgccctgaaaattacctgcatatatgaaatagatggcgatttatcacaaacaatatcattcgtgcacaaccacagagccctacatattgcagaaagctcccagcaatataagtttacttttcttcttgtccacccctaacagccacccatcaaaaatatgagaaatgctagtaggaacgtataagccaaaagaaaactgaactgctctccatatgaattttgcgtaatggcaatcgataaacagatggttaattgtttcatttttcatatagaaacaacatcttaagctgccattctagttttttcttgctaattatctttctttaacaccacccttttaagcaagtaccacatatattaagcggcatcttaagcttccaaattatcttttgatgatcttaacgaaagtcccatgcggccggtataatctcagagcgtaaatatatgctttgtttctattacctcgatctgttctagtgaaatctcattagacatgtttattgggattaatacacatgagaaaatgattaattaataaacgatattagaacttgatatgagaaagtggtattggtagattaatttgtcatcaaaacaccctcatataattaatttttaaaatagtttttactactatatagttagaaaataataataattagacatagtaaaaaaaacaaaggtagtactcataaacgatcttaaattaatatcctgtccgtgagtccgtccgatcaggaattggacggccaggatttctccacaccattgccaaaacatgcaaataaaaagagtgggcggccacgcccacgcgggccccgggcgcggcggagtgggcgggagcgttctcctgcccgtttcccgggctttttttccatttcccgtcgtctccacctcaccacctctctaaacaaagccaagatccccccaccaaccaaccaccattgaggagattcctcttcttcttctcctcctcctccccctcctcatctcccatcgcaaatccggccgcgagcgcgcgcgagcgcgacatgcaccccacgttcgcgcgcggcttaaattaggcaagaggcgcgccacggtcgcgccttctttgtctctcccttgtttttttttaaatttttttataagctgcgaggccgcgtcgtccgccattctcttcttcttcttgttgcacaccgccggccggccgtgcgtagtgcgtggcatgtccgtgttccccctagcagctgattgatttgatttggtttttttctttgcttgattacttccttcgatcttgccctggttggttggtggtggtggtgggttttgctatctctgcgtgcgtgttccggccgtgtcggcggcggcgagcgtgaggaggcgcggcggcggaggcggcggtgagcgaacggcgggtgccacgtgcccacgccttgcgcgcgaagctcgaggcggtgggctgggtgatggtgcggttcctccggcgccatagcctcgacaagaacagcgcgcagttccatcgccagctgagccacgacagcagcagcagcagcagcgacaccgccgacatgcacgagcctcacggcaatggcagcgggggcactcccccgctgcccaacgggagagccgccgccgcaggcgcgccgcgctcccgcttcggccgcgacgggccgccctccggtacaaccccccctcaaactctctggttcatctcgttcttgatgcgccatcaatctgttcgcgaaattgatcgattcttgtgttgatctgggggggcagatttggacgtgatgaaggagaggttcgcgaagctcctgctgggcgaggacatgtccggcaccggcaagggcgtgtcgtcggcgctggcgctgtcgaatgcgatcacgaacctggcggcgtccgtgttcggcgagcaccgcaagctggagcccatggcgccggacaccaaggagcggtggaagaaggaggtcgggtggctcctctccgtcaccgaccacatcgtcgagttcgtccccacccgccagaccgccgagaacggcaccaccatggagatcatgtccaccgcccagcgccgcgacctccagatgaacgtccccgccctccgcaagctcgacgccatgctcatcgtataattaacctccattcttgctctcaattcttgatttcttccgccatggcgctaattaatggagatggagatgacaggggtacatggacaacttcgtggaccagagcgagttctggtacgagaagggaggggacaacaagagggacgacgacaagtggtggatgccgacggtgaaggtgccggcggaggggctatcggaggtgacgaggaagtggctgcagtaccagaaggagtgcgtgaaccaggtgctgaaggcggccatggcgatcaacgcgcaggtgctggtggagatggagatcccggaggtgtacatcgagtcgctgcccaagaagggcaagaccagcctcggcgacgccatctaccggagcatcaccgacgaggagttcgacccgatcgagttcctggaaggcgtggacctgtccacggagcacaaggtgctcgacctcaagaaccgcatcgaggcgtccaccatcatctggaagcgcaagatgcagaccaagcaggaggccaagtcgtcgtggggctccatcatcagcttcgagaagcgcgagcagttcgaggagcgcgccgagaccatcctccacctcctcaagctccagttccccggcacccctcagtcccagctcgacatctccaagatccaatacaaccgggttagtagcaccttgattaattcttgccatcaatggcgatcgattggtgatcttgaatgtctgatgacgtcatcaatggcaggacgtggggtacgcgatactggagagctactcgagggtgctggagagcctggcgtacagcgtgatgtcgaggatagaggacgtgctgggggcggacgcggcggcgcagaacctgacggcgacggaggcggcgaggaggctgatggacggggacgcggcggcgaggaagctggacgccatggaggagctggagaagctcaacgaggcgccggcgtccatgacgctctacgacttcatggggtggcacttcgaccaggacgagctcatgaggaagaaggaggaaggcaccctcgacgaggccggcgaggccaagctcaagaaggcccccagcctcgcccccaagaagttctcctacgtcgacagcctctccgccggcggcatgaggagcccctccgcgcgccactgatcaccaccaccgccgccattacactctctctcacacgcacaagatgatcggcaccatcgccggagtcggacaagatgaccggcgccgccgctttcttgcacgctgtacataaccgaactcgacggacactagagatcaacgacgacactggagtagagatcagcttgattattaatctaatcagcatctaatctcttcttaccaatgccaattaatgctgggaggtaattactattgatttctttttttttcttccttctccatctttattctagagggggaaaagaacaaaggtggtttcatctgcaatacctgcaattcgacgccattgctactgatcatgtaactagtactggtttgtaccaagcagttctgagttctcttgaaaaaaggagaagatgaactccttgggatgtatgtatgtaactgggtggacggggaacacacactgtattctttcatttgtttcaaactaatctttttgttacacttggtttcccatcttgaaatgcctggttcttatccaaacttaggtcacactgtaaactgcaacagattatttttgtaggtttgtgcaagtaaaagcatataagattatatcagaaagtagccagccaaaaaaaaaatctgaaatctgaaataagcccagtagcacatcagatttagcactatatcgtgcttttactctttaacacaattcatgcacaactcaaaagaacaatatactggaaaatgaaaaggatggaattttataacttccaactgtctcatgcttatgacataatatacaattcacctaagcaactcttgctcgactcatttggcacttcagagatctcaggtcacaaggaagcaattgcctcaagagtaaagaccaaccaagcccaacaacattttgccaactgcttgctatttactccttccaccaacacgtatgacccaacaatggaaaggcaaaggattgacaggaaagggtacagggaaaaaaaggtaacctcttgtatgaacttcagtggctaactaaccctcaacatttgtttcctctaggggaaaagaacaaacaaaatcacttgttagcagtcaaaacccacgccaagcatttacaaacattaccaaacatcaaggaataagtggagcactatgtacatctgtttatacattagtcaactctctagatcattctcttgcctgacttgaactgacgcagttgggataggcacattgtgctctatatagtcatccgaagcttcctcctcatcatcagaagatagagtagacggccccatccatgacttgaaaccatcattaattcgcctctgcatctctggggttacttctattgttgtctccagcatttctagacccacattgtggggagtgtaatcaccctcatcaaggatcaccgcagctttccttctcaagaagaaggcagtgccagcatataggattaccaaaccccatgctgtaatttcatagcaccagaagagaggaacagaacaactacttccaagagccagaagcgttgatccaagaataattgccatgagaccaaatatgacagcaaaaactgcatttagtatagccaagcaacgcacaccacctgcatttccatgtttggtgttaatggctgcacttaggtataaattaacataaaaacattggtatggaacacgtttagaaccttttgccaataactttccacacaacatatgattttacaaaaataaatgggaggttgcactgttaccacgctgtattagaaatgtgtaagtacaaaaactagctaaaacatcagccatacacaatttactccacaactgatgtcatgacaaggtattagattaaattaaaaatttcagtccagtacaatcatgaaatcagatgcaaaaaagatctacaggacagctatccaaaatacttggatgttgatggttatcacagcagccactaatgttcaatcttgtccacaacagataatcatgtcatcacaggaatacaagagactgcctagtgagaattttgtgcataattaatggcaaaatgcatgaacacataatcacatcctcattgtcaaattttagtagtgatttctagaagaaaagaagttccaattttggaaacacatttttaccgatgtccactaatgatcagggttggaaatttcggaccgaaattcctccaatcagggtttacattaccgtcggtaaccgcgcggttaccgcccttaccgcgggggtacgataataaaaataccacggtaacctccttaaattcaaataaatttaaaaaataatttgaatttttgataaattttgcacggtttcgtacgattttttcacggttactgcagttaccgcacggtaaccgtgcttaccgccggggcgcaataaccccggccccaacggtttgggaaaccctgcctccgatacgatattacttcggccgaaatttttcattttttctattttttcatgaattttggtaatatatgttcaaattcaactaaattttgttcaaaatttcagaaatttcggagaaatttcaggatttaggtgacctccgatcaaaagggctaaaccgataaagtgaacccggataataatgatgtagaagacagattttcaggagtgctgtgtctgttgctgggcagatggcagatgggaagaccacagggttggagaatgtgaatgttggtgaaatctttactatctatttatgagtggaacacttatatttcaaattaaggtaatgttggtgaaatctttagtcactatctatttatgagtggaacacttatatttcaaattaaggtaaggaaacattatgaatggacttcataaaacttaatgttctctaatatcctatcgaccttatggcttccttgcctgcatggtgaaaattagatatcaatctttaagatgattgtaatattgaaaccatatgtatgtatggtccatgacatgtgatggtaaatcagaaccaagtcttttggttgcacacacttcccagaattgcactgtgatccacactgtgttcagcacttcaaggggaatgccaagcaatagatatgttcccagaaagctaactcatttaaatatttcaatagccgaaacaagatacaaaattatcgaagatctctggtaaagatgcagaaataaactcacctcttttagaagcacagaagttattctcgacgacacaaatcaatggatgtcttcttggagcagcatatgcaacagatatgcctgcaagtaaatacagattaattattcacaaaaaatatactactcttttctggcaagaaaaaatgggtatagaacaaagaaaaataaatttcatgaggtaactccaggcagctatggccaatgcatccaagaaaatttcatgaggtaatgtgtcagggtggaaccttgctctgttcttaacttcataccatttcatcaatcttacaaaaacaaaataaccttgcaacaggataacagaactctagatcatatttggatacgtaaattaaggcagactatcttatttcattaaaaaaagtgggaggacaggacaggatcataaaggcgaagaattcagggtgttttcagaatgtaagtagcttttggtgcgtctgactcgaacaaatttcaaatgatcatagttcatggttggtaattcctaacttcctgatatcctatttcaagcctggttctagttaaggggctaagaaatctggaaagttataaaaggccatggctaatactcaataacacaaagaattgccctcctctgtaaatttgcttttcagaatgttggaagaatttccatgatttttgtctgcaaaaccttctaaacacgttttcaaaaattattaatcattatcagttacttaaatggctcattcattttcttgtggctgtggtggaagactggaaggtaaccaaccgacagctaaagagcagtagtcgtgtcatactggggcttcagtataagattagattagtttcttagagaaaaaggctgcttagggatattagagttatctgttaattgaatggttggattatttgttagctgactcctgatacaaagttaatcaataaagtaaaggaagattcaatcagtaagtcccttcctactctattactccccctttcctgagtcctctcctcactaccaagtgccccttgttcatctagtgtttgacctctagttaccctgttgtgagttttgactttggtcaataacacatttcttagataattaagtcctaatataacctgagtttctgctttgcaagtgtactatgactctatgagtccatagtggagatatattttatgttttcatgtgtattctgaacttgaatataccattaattaataataacgtatgtgtcacactgaaggtactaaacacacaattaccctagagatgccatgtgaaaaatcaatattcttatagtacgaactgaggaaatgttcatgtggcatcagttgcaagaacctgagaaatggcatgccaggaaaagggaaaagcaaatcatatccaattagataatacagcctgttgtttacatgtaagatttacatgatgaaatggtaagatatacatggtgaaatggtcaatgaacagctacaatcaggatccagattatgctctgaatcttttgccactggtcactagtaaaaaaatgtgatgaatactttgctagtcatgaaattattggctcataaatgttttcataaattgggcttgactaattctcagcaaagcctccaatataaagatacgaaatggaaagatcatacacactaaagtttctacttcactcaatggaaccgcacaaggatattaatctttcagaaaaaataatgagacaactaggcttcccattagttataagtttcacatgatttgtccagacaaaagtcaaatgcaatttcaggtgaaaatacggtcaattgaagtcctatataactagatacacggtaaacctcatgatctcatgcccgattttttcttccgatgcccatttttggtaaaaatatgaccagcatcaaagaacaatagtacaatgcccctgatcacatttataatgtaattctgtgtatagagatagctaagttaatcaaccgagtagaatgctcccgatcacattaataatgtaattccgtgtagagatagctaagttagtcaaccaaaccagggagctcaccagatacaaggtaggcagacgagacggcgaagaggagggcggacgggacgaagacgaccatccagtagaagtcggcggcctcggcggtggtcatgtagaaggccccgccgcggtaccggtacgcctcgggctcctcctccctgctgctggccgcggcggggagggcctccagcatgcggcgctcgcggcagaagggccgctcggcgggctcggcggggaacacgatcccgaggctgaccccggccgcggcggccaccgcggccgccacgcacgcccccgcggccgccgccagcgggcggcggagccgcggcagcgcgcgctcctcgtcccgcagcgccgcgtacgcccgccgcggcatgaacgcctgccgcagcgcgtcgcccagcagcgccatcgcccgcagcggcagcggcggcgcctggaagagcgggtgggggggtaggtgtcggtggccggcggcggcggcggcggcggcggcggcaaccctagacgcggtgaggcgggtaggtgtgggaattgggaggcatggggggatttgggaggaaggcttttcggttagttaggttggcttgcagagggggagaagaatggggtgcgagtttctttcttggtcatgccaaagtccaactttgatcacctcgtaccggttgtttggcatgggtttgggtcaagaatttaattcctcgacaataatttggtttgaaaaaactttattctgggtgtgtttagtttacgtcgaaattaaaagtttgattgaaattgtaaagatgtgacggaaaagttaaaagtttatgtgtataggaaagttttgatgtgatggaaaaattggaagtttaaagaaaaagttgaaactaaaccaggcctctatgtaccggactagggtgattccaacttatttcttcaaacttccaacttttccgtcacatcgaactttcctacacacacaaactttcaacttttccgtcacatcgttccaatttcttcaaacttccaattttggcgtggaactaaacacaacctaaagttgcaacttaggaaggcaaatttgtgggatggcaaagttgcaaacgattgtctagtgtcgttattttcatcaacaatatagattagggtgtggaaatccatcagcataggattaattaaatattagcttaaaagacttaaaattagattgatatgattatgtcaaaataaattttctacatagattatttgtaaaaagaaattacaccgtttaacatatcaggaagcgtatacatagaaaacggtgtcagccctcctaaggtcggctcatgactgggcatcatgcgctccctagcacgtgactaagagtacggtagatcattcgacatggagtggaaagtgtaggaaacagtgaagtcctcactaggactatttggctctaattcacctcccactcccacttcgcttcttcgtcgaacatgatatcttgtgttatatgaactgatgaacatggttacccacagggtcatatacctactaggcatttctcctttcctgtaatagctctccctccagaatcgcgatagacattatcttgagattgagcaactgctcggtcgataaggggtggcactacgcgcaacatcttttttagcatttgctcatcagaaaggatgtctctgttgatgaaaaaaaatacactggcctgagagatttgctttacactagtgcaggtccaaagatttgctttcaggttcagggcatgccagttggtttgatcctacaaccaacaagaagcaaagaatccaaagttggtttgatgggctggtcagggatgaattgagcaccaataggctgatgttgctatggaataggtgattgttgcccaatgagtatctggcgaatccgctcaacaatcggttgctttgtcttgaatagtgcagcaacttgctctggagcgacatgctgtagattatgccttgtatgctgcggttgttgcctgaataaaacacttggttgaccatgagctgatgctgatgcacccggcttcccaaaagccgatattactgcaggctgctattctgggattattccagatatatgttgtcatttaccaccattattagtactaatggtcctgtattgtggaaaaacacccttaggaaggaaaactggccccttagcttgatgctcagttattgtgccatcaactacaaatttgatcatattagttaaagtattaacaagcactcccgactgattgatcaatgcataatgaatagcataatcaatgcgatcttgtaaagtgtggaactcttcaggatctccctctggtttctcacccttgggctcggcatctttaggagaacttgttccttcatcatcgagtgggaaagtgactttgtgtctttgaattactgtaccttgccgggtcaatatgaatgaaagcaaatacttattttgcaattggttcatcatctgctccagattcgccttttgttcttctgttagcttatccaacgttactgggatgatgttgtctgggtcaatatcatttgctttgatatcaaccatgatgaaaaccttgtcgaagtcggtcctaccaggcgtgccaaaagcgtgttgatgcaaaaaaaaacacattggcccttaagatttgatttactctagtgcaggtccaaagatttgctttcgggttcagggcgtgccagttggtttgatcctataaccaaccagaaacaaagaatccaaagttaaatccataaacgatagccgaccggctagattgtcgatgacgcatcgtctaaatcgagccgatgcaatatgatttggattggcaatgaaatatatagtgaataaaggactaattttactgcatcggctgtagatatcagcaatatataatctatactttaaaatatgtttaaaccaagtgattgggatagatcggacagctaccgagacagtatgaatcacttatgtctaaaaatacttcaaggtaaagattatataagctcatgtcatagccgataggtaaatctaacatgtatcggctattgctccgatacttctttatactaagatatcattgaaggttagatatattaaacaagaatcaatttatctttagtttaacctaagcagattggtctcaagcttaatatattttaccttagtgatatcttgatataaagggtagatttaacatatcaagtaaatagattaagaacaagatagctaagccaggtaagatcggctgaaactccgattctatctctattgattatcatgaaacaagctagagattatggttctagatattacttaatagatcaaacttaactgatgcagcattaagcatgaagagaaacataatatctaataaacaagcaaatgagaaccttttcgagatggtagatatactatataatctaattcgaggttatctaaccctatcaacactccctccgtcctaaaataaaataaacagtacgggatgttgtttgatgtagatgacatggatagtatttggagccaacactaggcagctgcactatttaccttgctcatcaagtctaatagtagagctaactcctagctataagcaaacggatccccaaaccaaacagatcatgcaccagagaagacaagcacgaacaacaacgaatgagttcaaatcgaaaccggttgttccttgcctacaggcttagtccatcagcgagaggtgtcagatcgatcagaacacggcggccaactggatggatctggatcagtttccctatgggtgtgtgtttagttcacgctaaaattagaagtttggttgaaattggaacaatatgacggaaaagttaaaagtttatatgtataggaaagttttgatgtgatggaaaagttggaagtttgaagaaaaacttgggaactaaaccaggcctatgtatacaaaataaactcaagcatgactaagcttcttaaccaaaaaaataaatcaatagaaaagtaaaaaaaagatgtatcacataagtaaagtttatcttccaacagattttatttcacataaatatgggtataagagatgagaacaactgcatgcagatgtctgagaaagtaggaagagcgatgtttgttgagaccaaagatgatgggccctatggttactgctcgattttgggatggataggggcggtgcggttagcgagatggaatagagagcggcggcaacggctgccggtgaagagatgagatatggataggggcgtgcgatggtggctgggtagaagtaggagggtccacgcttggcgatgaaaaatggagggatcaagaatggtggtggaaggtggagatagggggtcggtgccctactcttagtggtgatggaggcagcgtagtgcaatttccagcgatggggctagcacctagctcatagtggcagtggggggtgttgccctattcttggcatcgattggtggcagcgcccttcttcttcccaacaagggggaaggcacccttcttggtggtgagaggggtgatgcgaggggatggaggtggcacgtcttcttggagttgagggggagagggcaacacgtggtggtgatgtgggtggcgtgtcttctttgcagtgaggggatggggaggggatgcgggtggctatgtaggtggcgcgagggaatgaggaggggataaggatgacgcgtggtgctgatgagggatcaatgaattgcaacaaagaaaggtggactgggaggctaggtctttgaccggagaggataaggctagcccgtgtagaagggattttaggcaccaaatatttggcctatagcccgcgtaacaaagattttggcgcagctaaattttttgcgggactatcaacaaccctagctttgtcgatcgacgggctgaccgtactattttaacttaccgacagattgtttgtctctaacaaaaaaaaaataccgacagatcgtctgtcacgaagctttggcaacaaattgtatgacattaaatagcaacctttaccgatagatatctgacctgaatttggtgtagcatgattcggcaagtggcgggaacgggaacgataagtgtgtatttttcgattccgatttggaaaaagaatatgaaaagggaacgataattgtgtatttttatcagtctcacctatatgatctctcattttctttaacctatacatttaacgtatctatcttggaggacttctcattttcctaggtctctcttctcaacataaacttgtagctaacttatggccttgctattatatactacttcctctgtctaaaataaccgtcccttttggatggtgcactaaagtgaaatagcatttatacccttctgcgatggaaggaggatgtagcattgggatccccacgtgcaataaaaaaatagcattgggatatccatgtacagtataacaaaataaacaaataaatgactacacatggccccttaatatcactcctcctagcaacaaaaacgaaaccctgatagtttgaaaaactaattgcatcctaataaaaggattttttttaatgtaccttaaaatgagtatgggccatccaatggacaaggtgtattgctactatatcagtatatattgtttagtagtgtagtagaaagatatttctgggagaaaactacatggcattcgtgtaaatactcagatgataaatgaagagtttacggccgattgaccgtgcgatcaggatacggccggagaggcgaggaagcgaccgtgatggctaggttctatggatcgatcatgaacgaggacatgatgcatcgctggcctccgtccaaccgccgtccgtcgccctttgccgggatgatctggtgctttcgatcggcacggcacgttgggggtgcctccaatctccatgaccgtcgagtcgccggccttcgttgtcccagcgccgcaccaagcccgccccaactccggatccaccgcagatgagggggaagggcacatctccggtgagcactcccccgtcagaaccctccatcccgctatgctcagccctctctgatgctcgcgccggtgtacgcacttgtcgccgcacatcagagggcatcggcagaactcctatgtccggatcctgacatccacaccggccactggccatcgcccccacaccaatcctgcctcgatctacatcgcgctgggtttctcatttgcagtttctctctaccgaaataacccaataaaatggttacctgtgggacagtcagaatatgatcattgctagaggataccgcaagaacatgattttgccggtgtatgctgtgaaaatatatactgttttcttctagaggacatgacacattattttataaatttcatctgaattggagcgtgattttcatgtctcacgttcaggaatgtgtctgatgtgagcctgtccaggagcagaccatccatgagcagaactgccgaatatcattaaataatgtttatatatttgaagtttctttgttttattttttatttttacgagtaaaacttgtcctcataatagattttacatagtgtattttttaacaataatgtattgaaatattaacaaatactataaaatcatagcacataattatgtcaatcgatggctattcgctacgatcttaagtgtgctagcgcaatatctgtgcgttatatatggggttatctggaggaacactgatgaatgaacattttcttttatccttatttggtcctaaaattagtaaaatttcttatattttcagatagggttatttaaaaatattataccaactaggtatttattattataaaaacaatagtaaattttactttaaatcatcctttaactaacgttttcaatttgaatcaggtatttttaccttttatagtactgtgaaccatatttaactattttatccatgtacatccaaacttggcatatgccgacaagaaatagtcttacatatagctgcgagagtccattgatgagtaggaaccgatgtacttgagatcgttcatatacttgagaagagaatcggggtaatccaaaatgaattaaagataaaattatccgttccaaagtgaaaacacgagttagggtgtgtttggttgggcttttcaacctgcttttgcttttgcaaaagccaaaagctaaccaaagggcccaaaagccacagctacttttgttcaaagtcagcttttggtgtagtacaaatcaaaagcacatctacccctgcttttcatctgcttgcacctctaaagggtgatacaaagtgaaaagtcagataataaaatgtggcctaaattgaaattagctctaaaaatgtttttacacattcattttttggaaacccttgcagtgtgatggtagtttgtggtagtcactctacccatcaaccatgagagtttaaatcctagtgcccacgaatatgaaacatgtgcaagtggactttagtgaaatcagggatgtgtcgttttttactctattaatgtataatttactaggcacatttataggtatgtgagtgtagtgttgtgtgtgcatgtacgtgtgacctataataaaaaaaaagaacacattcatttcataattgtccataccaattattacctccgtttcatgttataagactttctagcattgtccatattcatatagatgttaatgaatctaggtacacatatatgtctagattcattaacatatatatgaatataggcaatgctagaaagtcttataatataaaacggaggaagtaataagctgatgattattcaggtaagcatccctggccctacatgcggtcccaccagtcattcatttgatcacatacggtaagattataataggtggcatgcagaagatggccaagccagtattcgagaatgtggcagtggacgtccttgggctatcaatggaaaatgatggactgagatgcttgggcctagcccaatggaaaatgatggactgagatgcttgggccgtcggaacgcttgggccgtcctcctgctaaactcacgatgcttaggacaattacttaattactcttccacctcacttaatcaaatgattaaaatgtccataaaaatcaacggtgggattattcctactacactactaccatctcctactgggaggtacagttaaaggcctctaaaaaaggcatcgaaattacagtatctcatttcaaaaacagttcctccacattctggattattatgctactaggagtagttgtgtgcctgtcttttatttttcccacaagcctagctgcactactaactcagagcattacatagatatatatgagatggaccctacatgattaaggagtagttatttgggtataaattttaaacctaaaacgagcagttattttggaacgaaggaagtagttgctaatggagattagctagatccactaacacttgagatacacaggtaaggtcttgaatgaatgattcgaaatcgtgtcttccttccttagtaccccacgactcttgtcggcattcgactacatatgtcataggccctcaccatgtccgatatgctagtctggagctaactaatctacccttctcactctctataattaattatgccaagtgaaccaatcaacggcggcatacctgtcaacttaataagatatatagaagaaaatcctttagatcggtcgctcggggaaggaaaaaatcgcccccctcctcccgacgcacgcatgctgccccagcccaccacgtgtccccgtaaacacctgccatgtgtctccaccatatagtccgttataacaaatcacacacatattatggaaaccctctattaaagaaatctgtttcattttttttttgttctaccaaaaatatttcacctagtgtactcgcaatgtttcattgtgtatggatctaatgttggtgaattgaaacattattttgtaacaaatcacccacatattatggaaaccctctattaagggaattcttttcattttttgttccaccaaaaacgtttcacctagtgtacttataatgtttcattatatatggatcaaaatgttgtagtgacttgaaacattatttcactatttgctgaaacatttgtttttatataaggtgaaccagcgcccgatttaaacgattgaaacattttcgatctacttagtgaaataattccgatgtacttggtagaatagaacaacgtgcaacatttaaaataattcaacaataagctaaatttttttcatcggaatatatccatgtgtggtcttattttaaagatttagttgcaatgaatttaatggtgcaatcgaatcatgatttggataaataatctaagaaaaaaattagtttaaaatagttttacacgcatacgtggtgctaacgtcatgctgacatcagcgtccaatttttacacctacggatcagacgcccgatccgtagccccatccaaataacttccacaagatagagagataatacacggcacacatgagatttcggcacagagaatcaatttacgggcatacccactggcctttttggggtccacatttttgttctgcttctgcacttctgctcattccgaagccttcgccgcgtctcgccggcgtacgccgcaggcgccccacctcctccggcgagccagctcggagctagacgcctgccctccccactctcgccggcggtgggcgcgcgggtggagcccctgcgttggccggacggcgggaggagatgacggtggcggcggggttagggtacgcgctggtcgcgctgggccccgccttctccctcttcgccggcgtcgtcgccaggaagcccttcctcgtcctcacccttctcaccaggtctctctccccctcatcctcagccctctcttagaactcccctgtttctgcttttggatcaaatcgttggcgttgtgaacttgtgatgtgggtggcgaaatcgtacatcggagttgttcggttggcgtaaaaagatgagaattaagttgatttgtgcgtccctgccccctccttggtttgattgtgccagggtttcgtgtggaattttactctcgttttctggatgctgctttctggtcgtatcaatacggtgcgactttttacattaggggaaaaaaactgaatctgattaaggagtagatgtgtgtaaaatcgaatcctagattactcggctgtgtacatgatgctactctccctaggtagttggagaccaaagcagaaaaagaattactgaacacctactcttgttgcagataatactttttgatcctatgttggtgtgcagagtccagtgaatttaaatcagtgctgtttactgttggacattgattagctaattcgtgtgccgcaggaagcttatatatttttttaaaaaaaaaagaaacaatgtttttgcctttttggtagtgttggggaatgataaatggctttatataaatttagtaaaaggttgccactgaagaaaattcagttgccagttctgctgtatgggtatgttaactttatggatgtacctattatccggggattttgtgtgtgaagtgttttttttttgtcacaaactgaatacctgatcacatgcctacttaaactttatttaaacatggtcatctatgtctttctgtaatatgcaatccagcaacactatgcaacttctatagaaatgttcacctctgcaccctgcaattaaactcacactatcctcagtatgtccttgatttggatatgtaaaatacaaaaggcccagtgcttactggtactagtacatttgctaattttaagttgtagactgcattactttggggattcccttatcaaacatgctgccaggagatcacacatagacaggaagctgctttattgatgacaccatgggtagtaggatatgattagttctttgggtcccaaaatatgagaaatattttcaaataaaaagatgactccatccaccatattagaaattagaaggattagatgaatttttccatgcaaaattaactcgaaattaatcactagatccacatcggcattggagccttgctgttgtggcagggtttgagcattccatacatcataaatccataattgctacatgatccattatttagcagtactctttgttatgatagtaacaatattcacacaacatgctatcttaattctgctcttatagtacataacaacaactaactactacacaatatgcacacatatgtgaggtacttgtgaaactgattcttgaggttctaaatacaaaatactgtaatatcttcatatttaaatgttaattctgttaatttctgtttgtgcagcactttattctggcttataagtttgataattctctcgggaatatggagggtatttctccctataagatcaggagcttggtggccgtatgcaattcttatccttacatctgttgcatttcaagaaggcattcgtcttgtcttttggaggctttacaagtaggtaaaccataattgaaagttgaacttcacacctttttatggcagtccctgtagtgtattcactatgtatagagatgatataattatggaacttgaagttgatttatgtctttatgatatgtgatggttactgtttttcaggaaaatggaagagatgctggattcctttgctgatagaatatctaaaccgcgcctctgtttgacagacaagatgctaatatcgttgggtaagttcttgcatcactagatcaatatgtccttatttcaagattggcttaatatttctccatccatcgtttatatagaaattatttctctatttggcttgtgtttgccttgaatttttatttaaaataggtacccactgatatctttaccgtcatttcatttctgtgaagaaatacatatttcatttggatatgggatgaatggtacctccatttttttaggtggtctacagttgcaacttttttccacaaaaggaattaaactttaactttgtattattcacaactcacaaatatcccgtaggtttctattttcctgatgtgtcatgggcttgggcccatttcaaggcaggatggcctgtgtggctgtatcacgcgatcaatatacttatttactattcacatggcaacaaacgacttcacatcagttgccttagagataagattagatttgctaatctgtttcatagtagtgaagtcatccaatctttataaggattgattctctctctaatattcaagcaaggaataatcaaggtctttagtctccttccctttctctctcttctcaaccaagtcttagtgccttggtggcagcaatggccaaccaatcaagggtgtctcctaccttgctcctcatacgttcatacttatatccaaccaatgtcttcaacatggagtaataattgcaagctgacgttctaaattttttagttagactatcaaattgacattgactttgatacagataaacaaaaccgtacttgtcctgattttcgttaaaaactactgagtgtaagttttcaacacactcttcatgttcttgttacatggtgcacttaacattttgacatactcttcatattcttgttacacagtgcacctaacagtggacataattataactgcaaacgataggctttgcagtacatatataggtcatcttggaccatccagttttaagttcttatttcatagattacataaaaaagtgcaatatgtggtaggcattaaggattcttagtaaaacaattgcagtgctgagttggtaaggttggaagattcactgcaaaactaccaagcattcttttaaatggagtatagaacagagccaaggcacacatatgtggttcttcatcttgtgattcgaaactagaaaataatcaaaacacaaacttggtctacggtattggctcagctgaatattctaaatgcaaactgtgcattcacttattggttagtgtgagcgtttgtccttcatatcactgtaagtcaaaaatgataactgctattgtttgaactttgaaatgtctttgcagctggtggtttaggccatggagtggctcatgccgtctttttctgcctcagccttttaactccagcattcggcagagctacattttatgttgaaaagtgctcaaggatgccatttttccttgtgtcaggtaagtcatagtttctccttactctctaatacgaattgggctctaggaatgaaaagaagccttccttctaattggattggtggtaaacaattttataatacaactctttctgttaatgttgtgctttcatttgtcaacatattttttaatttcataaatcagggtgatatttgatgcaaaattgtattatgctgaacttgtattgcataatgatgttatctctgtgtgctgtttgcagccattatttctcttggattcttggtcatccacacattctcaatgattattgcttttaatgggtacgacgagagaaagagaagtgatcaagtatttgtcccagttgttcatctgattgcttctgtaatggtaagaactaggtttcaattttttatttgagctgagcatctcttatgacagacctgacaatgcttcaacagattaatgtattttcataatgttgtatgcagcattcattgttttcttcatacaaaatataggttcggctatacaaaatcatggaaacatattaatctgttgaagctttgtcaggtcattccttagctcgacctaacaatgcttcagcagagtagatgtcatgtcttttggaatgtgctaaactactgtatggtataatataaaggaaatgtattagcatttgactgttattggcatcaagataactttatagtaaactgaaacagtgaaatgttgccccaagatgtaggaaaaatatacaatatcatgtataaggtaaatgcattaataggtgttactagctttcgaaagaagtatagttacaaaatctttttacctacttcatatttttagaaaacaacttcatcttgcatggaaagttggagcatttttctatttcttctatcatgaaactatgacatcagtatccatctatatcacaccatatattgttgtaatatcttttatatttccaacttattaattactccctccgtttttttaatatatgacaatgttgactttttgagatacattgaccattcatcttgttaaaaaaatatgtaattatcatttattttattgtgacttgatttatcagtaagtgttctttaagcatgatttaaatatttttatatttgtacaattttttttaaaaaagacgaatgatcaaacgttgattaaaaagtctatggcgttatacattaaaaaacggaggtagtatattatttgagtagcatgtggtatgacatgtgaatgtttcttcttgatcttctcatgtaatcaagtatggtttgcacaatgcactgctgaatttgggcctggcctgattacaccatttgttcatttcagacactaatcaatcttgcacctgggggctgcgtaattggtacaccactattatgcgtcatgggtgcagtgacgttgcaatactgctggcaaatggtatggcggagattatctgagcagcagcatcggcagtttagcagctagtgcctggcaatgctccttacatgtatcttctcatgtccaattttaataatcttttgtttggggtactagggcaagaagttgtaaacgtagcgaattagcgattataccactagtgggattcacatcttatgaaaattgcatgcaattcaacgtcatgactgagacattgaagcccatctgtttggttgctcatgaaatttttcattttcttctgtgctttgatgttgagtggtgttgcaagtttaggtgctcggcttcatcagagtttgcaccagtcatcatctgacgttaaatgcgcttctgtcgcttactgcttaatcatctttcattggcttcgatttctagtctaacgccttggagaaatcctcaaaccagtgcattacgcttgaacatcttatggagaaaatatgaagttgctcaaatggcaatgaagaatctttgctggtaaccatttctacacagacgtagttcttgttcacttaattgctgtaataaaccttaacaaatttattttggtaaggcaacaaactaacatgattttaaccttatctaactctgctagaatttaccactcttaacaaaatttgaacaccaaaaattggtaagatatcaaaccaaacaatacaaaagttgcagtagcgtctttttataggagtgtagatatgtgccaaaaccggaatttaattttaagtatgacaaataatgccaatgcacaacaaattgactaatactaaggcaccgtttaaatcagcttctctactcagctttactttattcttttacacgtttattgaattgctaagcaatgtgtttttagaactttttatatataatttttaaataaataattgctaaactttttttatagttaatatgctaatgacttatttcgttttatgttactctaataatttaatggtgcgaatatgtgatattggtacggtgatatgaaagttttcaaaaacatgaatagggcgattatatataaatttttaaagatataaaacatataaaggttgagagaatattttctcggctgttattctatagtacattgctactccctccgggttgacaatacttgttgttttggacaaggttatcattaaagaattaaaattagcaaacaccaatctctctatggcgtttggcagcgaacattccagagcctaccgtgtacaccgagtcaccgagaaggccgcttaccctttttctctctctgatggtggtgggtggagccctatgttgcctagacggcgagatgagatgatggtggcgggtggcggtagggttagctagggtacgcgctgacccctcgccttcaaccctcttcgtcgggattgtagcagaaaagatttgtttttgtcccgtgaatgttttttttgatgtattcttaaatccaagtgtattttttttataaagacaacatcagttccatatttccaaaaaaaaaataggagcaatttgcacaattttcacatgcagccacacaattttaagcgatagcgatataaacacacatcgctgttctctatttaactatccacccatccagcctaatcccactaacctccaaaaaaaaaaaaaaaaaaaaaaagccctcgtccccgtcgccgctcggaacgacggcgttgctcgcccgctcgtccccctctctcccccggcgctcgcctccgccgccgccgctgggcgctggatcgggtggccacgagctccaggccatcgaagcttgtggccgccgttccaggctcatgaaggtagggaggcggcagatggcgaggaagacggcgccggagacagagaggagaggagttcgccgccggtcgaggcttctccttcctgacatcagccgtcgcccgcgccggcgcggcgccaagccctttctcctccttctctggtcgctcgggggccatatgtgtcgctccgtctccacgccgcgcccgtgctctcggcacctccgacgacatccgccgccggcgaatgtagtatttgattagtaccgcctcgccggtttatgaacgcagttatgaatttaaaaggtggatcagctcacacaagttctcctcggatattataacgtgtttgctttgtctgttgtgcaggtttgcaggtgtctgtcttccgcgagcttccgcttcccgcttctctgcgcgcccagagaggtaagtgtgtgtgtgtgatggcggcgttggtggtcgggagggcgcgtggcgggtggggattcgggcacgagcgggtcggcggtgggtcgccggatgacgcccggtgggacgcgaggaagaaggagagagcggcggaggagggcgtgaggtcgccggacctgaggaagaaggaggggtgggactttgggcagcgtcgcgtcggcggcgggtcgccggacgatgacaggtgggacctccggaagaggacccgaggttcgccggacgatgcccggtgggacctccagaagaagaggagggaggaagaggagaggaatggcggtgggtcgccggagccggagctggggaagaagaatgatgaggaggagaagaagaaggtggtggtggtggtggcgaggggggaagaagtagaagaagaggaggtgaagagggggaagaagtggtgcgccggcatgcgcgtgccgtgggtggaggaggggccgcacatgctgtacgcgggacccagtttcctcgccggcgctgcaccggatcccagctctctccccatcccctccttcggtcctcccagaaggaggacgagcagcagtggcggtggtgtggccgtgcgcgtcgcgctgatattcttggcgggcctcgtgctacggttacgtcagttggaacgtgtacgagttagtaggctagcgttgctgtgccttagccagtagtagcagcagcagctaaataaataataataataataataataataataataataataataataataataataataataataataataataaataaaaaataaaataaataaaaaataaaaatttttgttcttccttgtctttttatagtttaacgagagctgagacagggaaaaaaacacttgtattatgatccatccattcctgcagttttgccgcgtgtcctgatgccccggccttcacgtggagcacagccgttggccgggctcactccatctccatggtgcgggtgggggagggtgccgccgcaagctccaatcggatcggtcagtatattgttacatccactctcttcctcgttgggttctggtcaaattcggaacttgggttcccatgctgatcaccttatcggtttccttcgcctgccgtctcctacctttggttggttcgagctgaaaagatttttcagtttttcttttctgaactcttgactccctgaggtcatttattctatcagttctcagtccaaaggttgcacgcttgcacttgacgtgtagttttagaatgacgaagaaatggatattatatttaaatataagtgccatgaattcttgtttagccgcgtattgaagttttgcatcaattctgaagtgtcccacctccagcgattactttcaggatgataagaaatggatattagtgctatgaattcttgtttagccgtgtattgaagttttgcatcaattctgaagtgtcccactcccagcgattaattagtttcaggatgatggagaagtggatattagtgtcattaattcttctttagccgcgtattgaagttatgcatcaattctgaaatgtcccactcccagtgatcgatctgaagtttttccttctttcgttgttcagcctagttgccacgcagacgaaatgatggggaatgtagatatttttcctgatgctgctgctcagggatcaattgaaacctttagttttaacgatgaacctcctagtgcggaaaggtattgttctatgtgctcgtgttgataaacttccatggctgtttgttgtagtgattgaatctgatgatgatccttagtgacgggctgtttcaatgtgaggccggtttctttagtaaaaaaaaaactgcaatttgtagttcacaagattgtaatattttgtcatgtctccctgtttagttggagaaccaaagcatgcaaagcttactgaacattaccttttgatctggtgttgcactgaattaacttggtgctatccactgtggaacattatttagcattccacattatttcgctaatttcttttcaaaaaaacattatttggctaattctgatgctaaatcctggagaaaacttggaagtgatagaaaacaatcctttaggcagtgttgcctccagtggattgtagagaatgataaattgctttatatgaattaagtactagtaaaagatcaccactgaagaaaagctagctaattaacttacaatatcctcaatatatccttgatttggatatgtgttaaaatatagaaggttacatatattaataagtgattagcattcttcactagggcagctagaaaaaaaaaacctattgatttgatgtagctattctttgagtttgatagaacacatccatgtagatagagctactgtaggtaaataagggcaaaaatcatggatttgggatcatctgaatataagagttccaatcctcatctatttcaataattgattttcagaaatgtaactccagtgtccaaactaaagcagcaatatcagggtgtatgctctgggctaggcttttgttaagtgaggtttttgggcagggcttttgttaagcaatgtttttaagctcatgtcacttatcaaagctttcttttaactgcaagatcatttatcaggcttctattcgtttgggagtaatagaaaacaatccttttgggagtcttggcaagtggattgtagggaatgataaatggctttatataaaattagtactagtaaaagattaccactgaagaaatagtagaaaactcagttgcaagttctgctgtcatgtatcgtgacatcgtaccactgcaagtactgttcttctgtatcttctccaatgggtttacaaagctatgagttactcaagagatctatgttaacgggtgtatctattatcagggtttgttggattttgatcctgagagcgtttttgttgtaaactgagtccctgatcccatgccttcttggactttatagaaacatctccatctatgtccttctggaatatgcaatccagtggaactaatgcaactacaatagaaatgttcaccactatgccctgcaattaacttacaatatcctcaatatgttcttgatttggatatgtgataaaatacagaaggctcagtgcttacctgtactggtaagtgattgacattcttcactggggcatctagaaaaaaaaaggaaaacgtaagctattgtttgactctaactgcttgatatgacttcgatagaaaaaaaggaactttttacgaatagagagcagctgtagattaacaaggaaacgacttagagagatatttgtgatcaaaattcatggattcgggatcatctgaatacaagagttccaatcctcatctatttcaattattgattatcagaaatgtaactccacaatccaaactaaaccgatatcagggtgtaagggctgggctgggcttttgttaagtgagatttttaaactcatagctttctttttaactgcaagaccatttatcaggcttctattagttatccgctttaggaacttttgaaacctttttcatccttgctgctcgattcctgcaaaagagttatatactgctttgttttggagtacttgtaccgctgattctataggttgtgaaacaaaatactgttattccttcatatttaaatgctaattttggtaaattctatttatgcagcactttgttctacccttacaagtttgataatcctatggggaatatgcagggtttttttttccatcaattatgaaaatagaagaagaacagatacctgactatctataacaaatttgtaatttttttcttagtgtgtgcaaacttgtaagtgaacaagaagatatcattctgtttacttgctttccatgaaatcctgattcagataccattgtcatcggtattaacttttgcacattactggcaggcagctctatgagttatagcagcatcttgaccgcttcctgaaatctgcattgatggctaaaatcaaattaccttttgatcggtcaacaattcggagcatacttattcaaactgtgagtgcatcaaaatgcacccaaaggatcactcaggtactggctatctgtcggaccaggagacttccagctatcttcagctggttgtgcaaactcagccctctattctattgtcattgaaagtccatccttgccagtaccagcaggctgcaaggtgatcacatcatcgataccgataagatctccacagtttgcggtcatgaaaagtgtaaactacctgccaaatgcgctcaccaagtggaaggcgaagaaaatgatggatttaccggcatatggttgaatgatgagggttttgtcgcagaggatttcaacatgaatgttggctttgtgacacaaagcaaggagctcctcattcccggtttcgacaagatcctttggcaaaacgggttctgatgacccttgctgagcagctagtggctgatggaagctcagtggaaccagttcaaggaatgtgagtgtccaggaagggaaggctgctgaagaaatgatgctcattggtagtggtattcttgtcaaatctgttgttctgtgggatgatcagataattggctcaggtaaaaataattttacccctgaaagtgtcacggcaccctagcttcgcgccgcaacaatggagtattcgagaggattttggaagaaattggaagggaaaaggaagaactcagagaagcagagatagaacagagaagaattgaattagatggggaattctgtttttacatcgttcaattcacatctcttctctgcggatccttatatagcaatgtgccattggatctctctcccttacatgtggcccagtcagtcactattaggtccactcactcccgtgataggccggattgggccgccgttcacgacgcgactttctgagcccatcttggtgcgccgaagaagcttcatcgcttgtctaatcaggaacagaaggtgacgatgccgtgacattctccccccgttgagacgaagcttgtccccaagcttcagccaatggaaagcgatgacgtaattcttgagcattctcctaggtgatcacctgaacatctggtccagaccaagcaacctgaacaaactccaccattttggctcccttgcgaatgaagcgccgatccaaaatgcggagaggagttggtgaagtatcttgatcagcaaggaaaactggcaagtgagattgaactttttcagtaggagccaatgctttcttgagttgagaaacgtgcaccacaggatgaattaagctggaagcgccagacgataagccaccaggctgacgtgcgcaagcacctgaaatagaccatagaaccggaaagaaagcttgcgattagtgcgagtcaaccgattgctggacaaagggcagcagcttcatatacacccaatctctcacagcaaactctctttcagaacgcttagcatcagcctgggacttcatgcggagttgagcccgctgcaaatgctcccgaatcaaagacaacatatggtcacgctctgttagccaagtagcaagatctgaagttggacaagcagcagcggccgtcaaaccaaagtatcgcggtttgtggccataaagaacctcaaaaggtgtggtacccaatgaagagtgaaaggaggtattataccagtactcagcgagggccagccagcggctgcatttggaagggcaagcatgcacaaagcaacgcaaaaacgtctccaaacactgattgactcgctcggtttgtccatccgtctgaaggtgataactcatctttaattgggaaccttccaatcgaaaaagagttgtccacaatgtgctagtgaaaatgcgatcccgatcagagatgataacttgaggtaaaccatgcagtcgatgtatattttgcacataagattcagccacctcaagagctgtgaaaggatgtgccaaggccacaaagtgtgcatacttagagaacttgtcaaccacaactaagatgcaattgaatgacgcggaacgaggaaggccttcgatgaaatccaaagaaaccacttgccaatactgatcagggactggcaatggttgtaaaaaccccggataccgaacatgttctgatttggcgcgctgacagatgtcacaactttgcacaaatcggaccacatctgcacgcaatccaggccatgcaaagagctgcttgatgcgttgataggtcacctgaataccagaatggccaccaatggctgctgtatggaggttagctaagatcttctgctgaacagagctgttctgaccaatccaaatgcggtcttgaaaatataaaattccattcttcaaagtaaactgaggaagtgcagcattattgatacaaagagcctgaacattactgcaagcatccggaaccagttgataaccatcaatgatttcctgcatccattctggaatgcacactgacaaagcagacaacgtgaccagggaagaatcagaaacatgagacaatgcgtcagccgtcccattctcagtacccttcttgtacacaatgcgataacacaacccaagaagcttagtgactgccttctgttgccaaggagttgacaaacgctggtcagacaggaatgatagactacggtggtcagtacgaatgcaaaactctgcatgttgaaggtatgggcgccaatgctctacggcaagcataatagctaagctctccttttcgtaagtagataatccttgatggtgaggacccaaagcacgactcaaaaaggcaattggatgatcattttgcagcagaacagccctgattcctttatctgaggcgtcggtctcaaccgtgaaaggaagagcaaagttaggcattgccaaaacaggagcagaaatcagaacttgtttgagagcttgaaaggattcttcagccaccgaagtctagatgaaaatctgacccttgcacaacatattagtaagcggcttactgagaataccgaaatggcgaacaaatttccaataatatcccaccaaacccaaaaaactacgtaactccttgacagaggtaggtgtaggccacatttgcactgcttgaattttctcctcattagtggccactccatttggactaatgacatgacccagatatgataacctgctgtgcaaatgagcatttaattttcttaactttgagctgatgcctagtgagaatctgaaaaacaaccctcaaatgattaacatgttcctccaacatacggctatagatcagattatcgtcgacgaaaaccaaaacacaacgccgcaagagtgaggataaaatgttgttcatcaccccttgaaaagtggccgaagcaatggtaagaccaaagggaatgacacagaattcaaagtggccatggtgagtacggaaggcagtcttatgctcatcggcagaattcatccgtatttgatgataacccgatcgaagatcaagcttggtaaaccactgtgcacccgataactcatcaagcaattcatcaatagtaggaagggggatacttactcttgaccgtaattgcattcaaatgacggtaatccacacaaaaccgccacgtgccatcctttttcttaatgagcagcactggggaagagaatgggcttgcactaggctgaatgattcccttattcaacatctcagtaacttgtgactctatctcatctttttgggcaggggtataacggtagggtcgcacactaacaggttgagccccaggcagctaaggaatggtatgatcaaatgatcgcgaaggaggcaaaccagatggttcatcaaagataccagagaagtcctgaagcacctgctgtacactgtccggaataaactcctgttctggtttgctatgtgagacacataactgaacaagatgagccacggcttgcttagcttgcagctgtttcatttgacgaccaagcagtaagttacactgagaagtctgagaattaattccttgcaacaaaataaattggcctttcagtgagacagtaagctgtttggtggcccagttcactgtcatgggactatgcgccgtcaaccaatccatgcccaaaatcaagtcataactgttaagagaaagaaccctgagagttgtattaaacacatacccctgagtgctccattgacaatcagtaatggcagaagtacagtgcaagatatttccattagccacttggacagaaatttgctgtggtttcctctgaacattccttaaactgtcagcaatggtggaattcagaaaactcacagaactgccagaatctaccaagatgagaacctccagcccctaaatttgacccaccattcgcatggtgccatcagtttcagaacccaaaactgcttgaagagatattgccatcaatgcaccatcggccgacactatgactcatcttcgagagtaatatcagcctcttgtagaatactgaaaagctcttgaactgcatgcagttgcactgaagtagagcatttatgagtaggagaccatttttcagcacagatataacaaagtccttgtgcacgccattgtaccttgagagctgaaatcttgtctgacggagaagaagtcgagcgatggggctcagtacccagacggtcttcagtgcgattactcccaactgttcaacctgggggttgaggtagtggccaagcccctttcattgaaggcttattgttcagatggccatcaaatttctttggttcacgagttgattgtccacccgacgactccgccgcttcttcctgtaaagtagcaatagcaagagcagtttctagatctcgaggtcgttgcagaagaacagcattgtgaatatcctatcttaaaccctcagtgaacctatggatcagatatctcatactcactgctggatcataagctaacaggtgattcatcaactcatcaaatttctcataaaactcccacacagtccctatctgcctaattgtatccatttgcctaatcaattcatcatgttgatccctatcgaatttgttagctactgctacacagaaatcctcccaaactggaaaccgaacatgagccctcgatgatctaagccaggaagcagctctacccatgaaatagatggtggaaacccacacccatagccctggataagtgttgttcacatcaaagtaatgctcacatctcatgcgccaatcttgcgggtctgatccgtcaaacttagggaaatcgagtttaggtactctgtgattgtactgccgattcccctgatccaaatcactcaccccccatcaaaatcgaaattctccaaggatcaaaagggaattcgattggaatcagacgtacccttgcccagagaatggatcagggtagtaactacacccgatgcctttccccggaaattttgatgaagacggtggccattggcccatttctccgcgccctccgccacagctgcaggcgaggtagccgtcggcgttggcagcaatggggccttcctttcctcgcccgtcaacgggacccgaggggaagacgccgccggtggagcttgcttcaccttgttcaggagatccacctgctgacgaaggtcgccaacttcttcatgcagatcctgcacagccgcctccacttgtggtctccaagcactcacgccttgatccagcttgatgatggcggcctgcgtatcaccttgagctcgatgcagcgacaccaatgactcctgaatctcacccagcaccttgccaaaatcaatattttgcttctccatagcctccacttgaagctgcaaacgagagatatagcatggcttctccaggattaacaagctctgataccaatttgtcacggcaccctagcttcgcgctgcaacaatggaggattcaataggattttggaagaaattggaagggaaaaggaagaactcagagaagcagagatagaacagagaagaattgaattagatggggaattctgtttttacatcgttcaattcacatctcttctctgccgatccttatatagcaatgtgccattggatctctctcccttacatgtggcccagtcagtcactactgggtccactcactcccatgataggccggattgggccgctgttcacgacgcgactttccgagcccatcttggtgtgacgaagaagcttcatcgcttgtctgatcaggaacagaaggtgacgatgccgtgacagaaagtcagctagttgtccttatttggtagagtaccatttttcactctgcagcagaaaattggatggcttttagcccttccatggcttactgcaaactgcatgctgatttatttccttgttcttaacacaggcagagaaggcccaattgctcaaacgcttttcaacttcattcttgaggacatgagatccggtccaacttcggttcgcatacctgtctcctactgaaataaataataaaacatgtattattagaaacaattactagaatcctaaaactaatcacataaagttgtatatttgcatatttcagaaggtcttagttggagccgttctggagttgcaacctttgtgctctcagacatcttaatcctgaacacaaatctttgctatccagattctataccttaggcatgggatgcaaggattggtagctgttgcccagtgtagagaagatttggataatgtacaaagaaacctgtgagattgttaattttgtacaggtttatcatgtcttcaatacctcatgctgcaacacaaagaaaaaaaaaacagtagcatgcaagtcagattgccagaaccatgagttcaagccgctgaaataagtcagtaattatggttacctgtattcagaatgactagctccaattcagcgacatcaatttgattcagagttactgctgctttctttgggcgttgtgtttgattaatcttatcaggctggaatggtgcaaatgtttgctcctcctatcacatattttttattttggcaaatctttctacagggcatcgtgacttcgcagttttagctgtagaacaccacgcaaagtgacttttggatgaaacacttttcaaaagttggatatttgctggtggacaccgcacccattaaaataataatttcctggtgagtaggagagagaatcgcgtgaaatattaaaaatgcccttgggctcacatgttacctctcttatctcttctctctatcccctccttccagcgccacattacatcgctgccacatctcggtgggaagatgagcgtgcgcgacggcttagcatgagcccgtcggtgatgggtggcggagagggtggctcggccgaaggccgagatgggtagagtggaccctcctgcaccttctagaggcagcggcgtggctgagggtggctagaggtggcaagtgccatggctggcggtgacagtgggtccgggacggcgacgacgacgtggctatggtggatggtggctcgattaaaggagaggggagggcctagtgactattgggagacagcttggagctgtgcggcggcgaggacccgaggtgggcggctgtggctctccgctcgacttcccctgaaatttgttgagggaatggagttagggaggtcttgggagcatgatggcgcgaggaaaagggaagggactcaatgaggcgttggtttgctttttgcggggggatgcggcattgctctggccgacgcaaagcagtggcggtggcatggcgcaggtcaccagtgccggcgtggagatggttgtggcctagttgatggatggcgacacggcaaggagggtacgtgccagggagctcgccgtgagggcgagggcagcgaccttcatgtgggtcaagggcagcgtcgccggagctacgccggtcggatttggagtggtgccgccgccaccgttccctatcgttgtcatccgtatcgccgggggagtggggtgtggaggaggagcttccggaggccacagcttgctctgacacgatgcagtgctaggaggggatagatagagaagaggcaaaggagagctgacatgtgggttgaatgacatttttgacatttctcgtgatttctgtctcctcacctagaaattattattttaatgggtcgtgatttctgtctcctcacctagaaattattattttaatgggtcgtgatttctgtctcctcacctagaaattattattttaatgggtgcggtgttcagcagcaaatatccaacttttaaaagtgtcttctctcaaaagccacttcgcgcgtgtcctacgggtaaaaccataagtcacagttacctgcagtaaaatttgcttttattttctgatgatgatgagtgccctaacatgggccatggccatagtttgttaggaaggaagtgggctactcggcttcccattccagctcggttggccggtcacctcaaatggacccagtccctaaaaccattttcttttatttgtccattgttcttgcgtttcatcaattacacggattggtatatgcatattgtacagtcaatctcgcaaaaaagaaaaaaaacaaatataagaagaaaaaaaacacggtgagacactataattggctttttgttaaataatcagcgtattattttgttttcatctaggtgaatagttatatttatgacaccatattttacactaaggccttgtttagatctcaaaaaaaattggccaaaaacgtcacatcaaaatatttggacatatgcatggggcattaaatgtgggaaaaaaaaccaattgcacagtttgcatgtaaattgcgagacgaatcttttgagcctaattacgtcatgatttaacaatgtgatgctacagtaaacatttgctaatgatggattaattaggcttaataaatctgtctcacagtttacaagcggaatctataatttgttttgttattagtctacgtttgctattcgtctggcttgttttcatacggcgttcattgtacctttgaatgtcgagagtgggacagttggggtgggaaaccgctgcagccctggcgtcatcctccgaagactccacctcggcagcaacggcaccattacagttgaatacaagagcgatagacttgagggctgaaagatggtgcagcccaacaaccggaccaccatggacatcgagctgccaccttgcatacaaccagagtttcagcctttggagctttggcatggctcctggttcaaacatcaaccccactaccgaatcccgaatttcaaaattgaacttgcgtaaattctggaagccttggccgctgatgacccacctcaagttggagacgtcagaatttgtgtccaaggtaagagattgcagaatgggtaaacttgcaaggatctcaaggcctcccactccaccaacttctacacgtaggcgggtgaggttgacgagcgatgcaaattggcttggtatggtagggaactcatcgtaaaagacaagtctccgtagagggggaatgaaaccacaagaaatcatcaatgaagctatgacatcagggttgcttaatccccgcgcaagacgcaatgattggaggctgcacttgacaagcttggagagagaggagatgcatgctgtcctgtggccctccttgctgttatcttcgttggaatctgaccaccagattcgaacatctctcagtttgctcagctcacctagcccatagatagattttactgatgctctatctagatcaatacccgacaacacctccagagcttgcagatttcctatttcgtcaggcagcggcactccaaaagggatgagaaggtgcaccagtttctgtagctggacaatgcttgcaggtagtttttcaatacgagtatatgccagatcaagtgtttgtagatgctgcagcttaccaatctcttctgggagcttgtggatacctcctttgattctcaagtacttaagttcacaaaaatgtccaacatgtttaatatagttgtcccccagacgaagttttatagccagcacacgcaggacttgacattttgcaaattctgaagggactactggcaaactttcatgcttaaacatatgcaatgatcggagatgggataggtcctttgatgctttaggcatcttcgagccttcagaaaagccactttgcagggataacctgcgaaacttatttgaagtatagtcactggggtcactattattcagtatggtaacaaaattctcctcctcagcttgtgacacaataaagtcgagtatgacatcgtgtattctgcagattttcactctaccatctgccccaatctttgacggttgtatcatgcttctgtttataagctcatgcaagtagctttctcccgactgctccgtacatgctctgctctgtccaagaattaatccttcagctacccaaagccgtatcaaacgtctaggatcaatattagaatcctctggaaagacacttaaatataacaagcacgtcttcagatattgaggaagatcaaaataactgagaaacaatatcctcttcattttgtcaacaggagaatctttctcaaccatagaagagatagagttctttattttggtccacacttccactgtcggattcttattggacaataacccagctatactgataatggctaatggcaagccaccacatttcttcaaaattacactagctgcttccgtcaaatgtttggggcaatcttcgctagaaaagactcttctaaaaaataatttgcaggagttctcttcactttgaggcatggcttcgtacatatgccccacaaagtcgcaacaacatgactttgccacatctcttatgcgtgttgtagtaattattctactcttgttgtcattggcaggcaaggctgacttcaattgtttccatgcatctgtgctccagatatcatcaatgatgaaaaagtacctacgtggaaatgttgtgggagttgcattagtaaggttgctgcattgcaacttctggtattgtattattattatttccaatgcaaaaatatatcatattttccctacgcacaagttaataagtttattagactgaaaagtgcgaaggccaaatgtgagaaaagaatatcaaaatacgttctttattactctatttttttaactcgtcatttgggacacattaatctcatattctttttatacacatgtttgatcatttttaatagcatattcataaaaatattaaaagcaataactgcatgaaagtatttttcacgaccaatctgctaatgtcattttgacacatttatttttagtacttttgtatatattccatatatttggaaattgtatttccctaattctacaatatgctatcttttttagcgagtgtataaaaatagtagtaatacaaaggagaaagatacacaaaaaaaattcgagtttcccccattttcttcatcttgctccgcatcacagccactagtccaccccttggtggagatatttaaccatttgccacatttaaatgtggcaattaactttttgccactggacccatatgtcatagacacatgtggacccacatgtcattgagataggggtggcaaatagttatttaccaaatctaaaagtggcaaatagttaaaagcccctgcaggttgcagtctcaggcacaccaccgtcatgattttacgaggtagtgcctaacacgttggccttgcatgccctcaactcgaatgatatctcagccaacatgcatggtggcagtgacggacatagcttatatagatggggcggagaatggagatgctcactcgataagagcaatcgagcacaacacatatcgtattaatagttcattcgtatatctgtctcaatttgtcaggcgtttataccttgttatacctaaatttgatgacccatgactactataaggggataaggaggtcttgagagtgtggggcgacacgagtcatagttgagtcggtcgacccaccctgcctaatgggtggatccacccctgcatggtgacctttctctgttggcaatcaaacaccacattccactttaggtcatgttgggttaattcccacatgagagaattgaaggaaaataatttcacatcacaatagataagaaataaatctctttcaaatctcccttaattttattgtgagagggattaactgaacagtaaagatgacaatggatcttacgctagctattatctcggttatgtcgatgtcaacccaacccaaccccgtccaagctcactagccaatcaggaaaaacttttgagtaaatggcatttatggtacacgaacttgtatggcaggtgcaaataggtacaacaataacttgcaaattgtttattccggtacaacaacttggctaattcgtggaaacctaggccaaaacaatgcacacaagtaaaattgatctgatatgatcccaaaatccggcagacctatgaaataggatcctagattgggaaggacggggtggggggaagggaagagggggggggggtttcgccagctttagagggatggtcatgtgaggaggcgcgatgagcagcggaatgggtgggcggcaaggcgacggcagctccaccgaagccgcgatgagcagcggaatgggtgggcagcaaggcaacaacaatgccactgaaggtctgaagccgcgaggtcaaagagggcgcagatatagggggagggggcgggggactcgccagcattgttgacaagctccaaccagctcgcgaattgttctaagttaatcatgttcacaattgttctactaatgaacacaattgttctaagttaatcatgtatttttttctactaatgtcattcacgttaccagttaaataaatataattattatttccaactatcaaaatgaaaaggtgtaacttatataattcaatccgaataaatgtgtataaaggagtatgttttatacttgaagctaaagaagtactccatccattgtaattatagtaatctagtggagtattagacacaacctagtaacctagtacaaagttactagtagtagtatgttgaatgcaagagattggtggaaatcaattaatcgttcaattgggaaatggccttgggatgaccgacggtaacaactttctctttcaaccttaggatcgagatccaatgttctaaaataattagggtgatatggctaaacgacggaatagaaaaatattattaattacacaaagtgaagataaactatatgtattggcttatatataggaatggaagaatggtggaaatcaattaatcattccgtaggattgggaagcggctttgggatgactagcaggaacaactttctattccaactttagggtcgagatccaatcttctaaaagatttggggtgatgatgctaaaccaatgggcagaaagaaatactattagtactaaataaggatgaatatataggtttataggattaagagttgcattaacttgctaaaaaaaattgatatactctcagttggttaaatcatgcaaatatatactccaatggcttggaaaatgtcacaagatccatactaccaaaatgttctacaaaattaattcataatattttaatcgatgctgttgaacaataaatcatgtatggataattacctcttgtcttctaagttcttcctcaacttcggtataagttgttccatctcccagtcgtttgacttttcatactcgcgctcgttaatctgaaagagtatgtctctaagaagcttcttgatatcaggagtccgagatacagagaccatagcccgacaatcaaatgattcatcaatcttgtgatacacctccatagctagagtagtcttgcccaaccctcccgttccaaagatggacaccaccttcagttgcttctcttcgctctttatccagccaattatctgttcccgaggcttatcaatgcccacaaggtttttggcttgctcatacaaggctggtactcgaggatccaagcgcacatgttggggtgcaaccatgagccgatccgcgatcttataccgttcatgcctctctttctcttcgataacacgttccttgagttgtttgatctcatctccaatctgatggttctcccacagcttcttcatcttgcgcacgcccttttgcaggagattagcattggcatcaccactgctgtggttttgcaagaagcggtcgatgcaatcctcgatgtcgtaggatagctcacgcaccttgttcctccactccttggtctgcacatcgatctggtcgtcgtccatgtctcccagcctctgcagcacggcgttcatgcttcccagctcgtctctgagccagcggatgccgctcttgacgcccttgagatgggtgtactcgtcggtgagcaaggaagccagcttggctatgacggagttcatcgccccggaggaagcgctcaccgccgcaccagccatctcgagcacgcgagctccagatctggaacgacgacgctcactgctgctgccgccgtgtgggtgtggactgtggaagtgtggagtggggtttggtggaggacaggaggagagtgaaaggtggaagagattctccggccgaaaggctcacgcgctggcgacgcattggacggagaaatggtcatacactcatagtactattttttgttttttttaatggccaatcaataataattgatgacggaagtgagaacgaccattcccaaggtaggagtacatccgtatcagaataagcttcaagtatatgctcagaatttgcttaaataagcaaaatgtgcttcaaggtagcatacaaccaattgtttgagaaagagaagcaccggatcacaggccttgtttagttcccaaaatttcaaattttgataaaaacgtcacatcgaatctttgatacatgcatgaagtattaaatatagataaagaaaactaattgcactatttgcatagatagctcgagacgaaccttttgaatctaattagtccatgattagccataagtattacagtaaccccacatatataatgacagattaattaggcttcataaataagtctcgtggtttccagacgagttatgaaattagttttttcattcatgtccgaaaaccccttccaacatccgatgtgacactcaaaaattttcttttcgcgaactaaacacacccacaattcacagggagagatagggaatgaaatgagatcacagcatcttcctgactaaaaagctggagaagacataagaaaaaacataaaggaatttgctccgtttatgtcattaggcaagatcggcctgtaatgttcaaccgatacacagtttctggtaatgaatacatcaatatgggcatctgaatttccaaatgtaaaatttaagtttctcaaaaatggagatgatgccgccgccgccgccaggactttgtctatttaaatgctcacaaaagcctgcatgagttgtgtcaattgttatgccgataagcttgaatccgcatcagacaatagaacactctcgtagggaacaaaaaataaaaaacaagcaatgtctcacctgacacgatttttctcatcacaaaagaatggtgttgatgactgataatcatctgtcccaaagtacctatccccaaactcacccatcccagggatgacgcggaaatcatcattcagaccaaactcgatttctgatgtcacgatcttcactcttggaaatctcttgctgaccacatgcactccttggggagcctggaacaattccaacagtttttgtggtaagctcaatggttatcaaccgccacacaataacagcgaacgtgataagttccaacatagcaagcatgtacagcaatggtcataagttccagactgcacttcgagaagtaacttgtagagagttatccactgtgccctccattaactgttcagcaatttgccgaacaacagatacagaaagttgaaaaatgcagtagatatgcttattagctagcaattgtgttcaccaaaccagtacaagtgaagtattgaagtaggcagaatgcgtaaataagatttagcttccactaaaggacaaccttgtaagaggaaaaggagacaaaaaatattatatctattattgtaccaaaacaatcagattatgagcttcaatagagcacatatgcaatccatgcaaataaataaataatgaatccaaagtcagcacttcagtagacttactgatataagattcagaaaaataatatttgtttcctgtacaccctttttcaagagtagagatatagcttgaacagctgaatttcctggtatgatgaagaagataagactatatgagatgaaacgaatatccaacagtagagcaggtgcgcgaaatttcagcaagtcaatagacaaaacaatgtacattatatgcatgagatacattgagaacatcacagatgacacgtgaaatagtttgaaaagggacaatttgccaaactaattttgttgcaaaagtacagaatccccacatttgtttgctctcttttacatgagataggtggaggcagaagtgctccagtgagcacaagaacaaaattcatgtaacaacaggaaggatatgtgagaatcatcaacatacctgttcccagtatgggatccaacaacagcacatgcctgtttgcaatatctttcggtaaattgtgatagattagctgcaaggaatcaagagcttagtaatttgactaactccaacaaataatgccaaaagtagattaaaccaaacctgtttgccattgtctccttccctgtgaataagaatcttcccaatttttatacctttgcagcatgcccgcaatgcattctccatactctcaccactggagagaagttgcagaaaataattaacatagttatgcctttctattcaaaaatttatgatgtgctttactaacaagatacttgacaaggaatgaatccaagattatgagttgctcaagaaagcatgcttagtagtgactaggatagggtttataggaatgtagcccaaaggccaggctaaggacactgaattaaagtttccaatattttctggtacagcatttgtaaatagccgtgtcgctccattttatcattttgcacgagttatcaagcaaagaaaaggagaaacataaagatatcgctgacaaacatgatagtagcatggtacaaaataaaaaactttccaactgagttccaagtgtgatctcaattagagtctcaagtgagtgcaagatcaaaatatcaagaagttactaccttctaatcactgagataccacacaatcttttggagaactctaccccagtgtaaaccgatcctgcacgcataaataagggcaaagatataaattaattgcaggagaaaacaaatgcatataactccatgattctcaagagaacagaactatggaggtaaataatctataaccccttcggatagaagtcctcaagatttaccttggttttgtctgtattcagctaatatgaaaatgaaaatgaggacaattacccttgtttgggaaaatttggaagagcaaacaatgaatggttacaaaatctcaatgtgagaagttttatgcgagaagatcaaacaatgaatggttccaagattttagaaaacatgaacccaacaaatagatgcttgttgccatgcgcaattatcaaatgatgagtaacaaaaacaaaaggaaaaaatatgaaccatgatactgcaacccatacaaacttaacgcagaatgacatgccacattatgtttaatcataatcattagaaacaggagaataaattactatgaaatatatagcttgaattcaatggaaaaatactaatacaggacattatgtttaatcatgtactggtccagattcagcatcttaatacaactagcagcgagcaagattctctgcatttgaagagataatttgtaacaccagaacagtacaaggaagacaacgaatggtcacagtgcaatactacctaccagttggagttatgacctgcttttccttgaatggaagatgaccaagaccatgctcaacaacctatattccacagcaaaattcaagctaccatgggaactcatacaaaagaaaacatgtcaattgcattttcatactgaccaatcgaatcaaccgatcagcatagaatatgaaatcatgtgttgttgtggcagcatcccgtattattgtgtgcatacctcgtatctgaaagaaagaagaattgaaatgctaatatttatatacgctacaaaaatccagaaataattgcattaacattcaatattatgagattatcaaaaaacaatcggttttataagaaaaaactgcagcacatttatggtcacatgaagtacctgataagtagtctgaatgacatacaaattggggtgtactttacagagatcatgttgaccaagcttagtacgaatatgctgaactattaagtcaattgcaacatcattatcgccacctcgtgggatgataatatcagcatacttcttggttgggaggatgaagtcttcaaaagcaggcttaacaaactttgagtactgtaaaacataagtagaattaagtggttaatttcaaaaaagaatcatcaaggagatctgacctaacaactaagatttgtaaacatgttaaataaaaacagctctagtgagtaaaaaggtatgtgaccatgtaacctgatctagcacagttttgatatctctacccttctcaatggtgtcacgtcgaatcctccttgttaatcgcacatcagcatctgaaaattcaataggatgaaatacaataaaggacaacacattcacagggttcaatggatagctacaaactatttttcttgtgaatttacaggccctgtctatcaacatacgtaagttcaagatagtgataaattcacaagagtgattagaaggatgtctctcaagttctttaactagggggcatgcgaagtggtagccttggttgtttccttcacagcagtttatgcaatatacatttggcgacatttgtgacttcaaaaataactcttttcgtatttaaaaaacaaatgaacagtatttcaaaatatggaaataactaaaaaattgtgagttgatacaaaagaactagtaaatgaacaatgaaatcagtgttctaaaagtcagccctaggtgctgggtagcccccacaatcaggtattagatgcctatatggtgcataaggtcactcttgggtattcctgttgctatttagtgttatagtgtctagattgtgtgtgatatgcttgctaatttcttggattttactagtaccaagtgtaactcactgtccaggaaataagtgtacgacagtaagagtggtccctccgtcccattttaaatgcagccatgattttctgtgctcaattttgatcgtccgtcttatttgaatttttttaaaaaaaatcaaaaacattagtcacgcataaagtactattcatgttttatcatctaataataataataataatactaattacaaaaaaaaattaaataagacgaatgatcaaagttaggcacggaaactcatggttgcacttaaaataggacggatggagtacttccaattcaaatcaaataggagacaacaaaattacattatgcacatgtataaacacaaatgtggataaaatatggaaataatcatactgaccacacgtacaactgatgattactggtcatgggcaagagctagagataataagacagtttggcatgcaaatattgatacctgtgtcaacaaagatcttcatgttcatcaaatcccggacacgtgaatcatggaaaaccagaattccttccaaaataattacatctgaaggattgacctgacagaagtcaaaatattagggtttctctgaaacataaagtaaaacagatatggataaacaaagagaagaataaactgtaatcagtgatccaattttcatggataaaataatactatttgaaattgtgaaacaataaggtgcttagtgtttactagaaactgcgccaattaaaactaactacaatatattttaacgaggtttatttaaatatgtgcaaccatagagttactacatttcagatataccactacaaggtggacttcgatatgccactgctaagtaggaaaattctgacatatgccattatgaaacaaactggacacaatgtccttgtcctctcccttcgtccgttccatatctaccgtccccaacttctccctcatcagccatatctaccatccccaacttctgcctcatcgacaggaaaggttgctttgctgaagggatgtactacttcagtgactagaactttcaccaataatggtgtacccagccatggcctgtacaattggcttgtcgccttggataagttcttttgagtatttgttgttagatatatgcagtaatgttatgtgacatagttacatgcttcacagagcccgacaaaaaccatgcagataagctacgaattttactggaatatactatctccatcccaaaatataagggattttgccgatgtaattattggatgggcaaaatcccttataatcactcccatgtcttcacatttcccttatattttgggacggagtaaatatcaaattattggatctttcggcatttcaaaaccatcactttttaatggaaaacttctggtggcagattgtattaataggcatatatgagttcctaaccaaagcttaagcacctacaaaagggaaatgaaacttctgtgttctgactccctagctatccagcagaccagcacacaattttcagctacatttctcttggacaactcacaagatctgaacgaagacaaaatgatagtatgatactcatgaacaatgaaggttagctcaggattactgctatgacaatccttgttcttatgctcatttttttatagaatactttttttatagttgtcgagagttcagtcatactaccactgtagtggtggcttagattccaagagggaattcaagctgtgaagcctcaccaggatgagactgtgctactccaacaatcacagcagctacgggagatggtgaagtagatgagatatctctaattttacctactcgctagtgtcatataataaagcaacaactttgtactggcatatcccaaaaattagtaattatgtagcatgtatctaaataaccctttctacaaatatagctgctattttaaggagagttcctactaacttatagatcactcagttcatacagcaggcatagattagaatcttaaggctttattagaaactcaggacgaggaaaccttcagtttaccaggtgagtaaattatgatagcactgtaaaatagtagtacctttcttgcacttgcaacactcttatatgttttgaagttgtaattaggaatgtccacagccttgccatgtttcaagttctccatacaagagagtagtaactccgtatcaaatgcatctgaaataaggacagcagcagtagcaccaaaatcagtgcacagctctagtcaccagcatacttaggcaaacttcttaggaatatgcatcatacctggatgatcaaagttataatcatgaacatggaccaattcctcatcagacaacccataataaaaagactcctgcaaagaaagattgtaaacaaaatatggcggcaatatgatatttagcataaagggggcacattctggtgtctagcaatacagcacgatatactaatttgtacaatctgtaacaagcatgttcgtagaaaagttatcttgtcatatttgacacagtataagtaattaatggaaatagtatacaataaacacataatgctggctttaaatagagcaaattttcagatgcacgatcacaaaagtaacaagataataaggttaacagtgccaatacagaaaaataaagtaggagcaactagaaacttgctatggaaagcagggggtactattcgatcacaatcagacagtcatgcctgcaagcctaccacttacagcagaaatgaattatgtgaagcagttagcaatataagtattatgatcatggttcattgaaagagtgacaagaaaaatcacttttataacattaagagtttcgcgattgaaaaactaaaaataccaaaaaagaaacagtatatatcaagtatgatgttacacaatatatctaaggcagagcaacaatttcagaaaacagatactaggcactgtgccttaactgtattagcaaaggtaaaggttgtacacttgaaatatcatctcgtgtgcatgatgctaaaccatgaaatcagggaaaacataatcccatttagaggataaaatgatgtgtactatataactatagtatcctagatccatgtaatggatccaaacataccaatatctaggttctattaacgacgaaaatacaaggttattttatttgtgatgcgtgaaatatggaacaaagtaactaaaaaaatgacagttccatggatgtatttcaccttaataccacatatattgaactaagaaatatactattagtggcatatggtattcaaaagaaattcggatgacacaaataccacaaggcaaaagggacaaacctgagtaacaacaactacacgctgatcacgtagctgatcgattatcattttgcatacagtacttttgcctgaagatgcacccccggcaacacctgtaatccaaaccaaatcagggaatgaaacatcgggaggcaaaagggctacattatgtacaacagtcgatatttactgattacttgcaaaataaacagacaaaaacagcactgagcaagtactactaaccaatgacaaatggctcctggtgcccattctccacccctgaggtcgttggttgttcctcccctgtcatggagccattgatgttaagctcatccaaacggagcgtggagtagtggaccccagccgcggcagcatcaagaacctcatcaactggtcttgaacccatatattgttccaagaacctgctaaaatcaccaggacatatcaaacatagcacccttgtaaaatcacagcagctacaaaatagaaaacataaagcagacaacgtttgcaacccaagaaagaatgtgaaacaaccaaatcaggacgctggcctcactctacacgcctcttactcccaaagatgctgcgactctattttggcaacaacgccatcttaatcccctaacatgatgaatttgcttgaaaagaaatcatgttctgccaactgcaggtaaaattctctaaattctttaagatttcagcggacaccgaaaaaaaaataaaaactgattagcaacatcaccaccaccaccaccaaatgcaattaaatcatatctgacaagtacagcaaactcaagaacgcatcgtccaaccaaccggggcgcgaagccacgcacggagatcgccgccgccgcaagaagttggccgggggagatcaaccagaaccgtgcccagccccggtggcggcagatacgggggacggacggggaggggagcgggagggggacgaaatgggagaggagggagagagagaggggttggcgagtcggtggaggagagagagaagagagaggagagagagagagtgggggggagaggtggaggaagaagccgaggtcggcgccgggagacctaggcggaagaaattccgtcctttttgctgccttttttgcccggtggaatgcttttattttattttatttttattttataaaaagaatgtttgctcttttttttaagtaaaaaggagaattgtgattaaagaatgtttttaggttgtgctattttctaataatgtttacttaattattatactccctccaccccaaaatatttgatgctgttgactttttaccgttcgtcttattcaaaaaatttaagtaattattaattatttttctattatttgatttattgttaaatatacttttatgtatatatatagttttacacatttcataacaggttttaataagacgaacggtcaaacatgtttaaaaaaatcaacagcgtcaaatatttaggaaaggagggagtacttattttggaaagattgtaattaattgcaagttaaactagtcccgtgtcgttttaatttgtaggggtgaaatggttctgaatctgattcatgagctatcgtaatcatagcgaactctgaagttaggttgtagtaccatatttcaggcagccggtcgattttgggtccaaaaaacatcaacgcagcgtcgcagccagtactttcttatgcttttcgcaccttatgtactatacacgtaggatgttttttaattacgagaaaatctaaaaactattattgacaaacgcctcaatccaagaaataacatcaacaaacccaacttcttagaaatatcatcttacaagcgtttttgtcctaaaaataccattaccgttagatttttgttaacatctctacgttaaatgctataaaagggtcactttacccatatgaattgttaaaacatggctaaaactcatacttttttcattagcatacactaatttgtagtttgctctttacgctaaattattgtacgttgaccaaaagagagttttaatcatctttcaacaattcgtaggggtaaaatggtttggtatagcacttaacggagggctactaacggaatcctaacggcaataatatttcttgaaaaaaacacttgtacgatggcatttctaggaagttgggtttgtcgatatttcttggattggggcgcttatccatagtatttcttaaattttctctttaattattatatatcaattggtttcaaattataaaagttacaaccaatccaacttaaatatattcatggttttaattcgaaagcatctaaaagttcaacaatatatgcgctggcgggtaaatccatatcgtcgcacacaccatatagggccataaaaagtattgctctcgtcacgtggaccgacaatgatattcattatatatgagtttgagaaacgcctgaccgtatttcggttagcatcacaaggcggtgggctagccggcccaagtctcaccaccccttttaataaaaatggatacgaaagctttttcatcacatatcccgcgttttttttattatgtatgggtttatttaggttgtaacaattttagtgtcacctaactgcttcaaaatcacaaatcaattattttccaacaataatgagccaaacattattaaaaaaaaagatatgaacaagggactaaatgagtcacgtgtgaaggaaaatcttgccaaaaaaaatctaccgaaatagagatatagacatcaaattccaccgatgaaccgagcagtactagtagtagtacaacctaacaagataggcaagtgatctcatcacatcaaagcaaaccaccggacgctatattgcgtggtggagcacgtaggggtgaaatcgggtcgggttcggtcggatctcactcttcccatatccgaacccacattttataatcggaatcgggttggatacggatagtatcgaatacggatacaagcacggataatatcgggcacaaatatgagacgaatacataccaagacggatacgaccactatcggttatgaatatctttttggatatcaagtcaaagcaacgatcatctatactatatagacaatagctatatattcaaccaaccccatataaccataatacgactatattattagggcttaagatgtacgggcaatacgacaatgaacaattgatttttaactggaaaaattggaagtttggttgaaattagaacgatgtgatggaaaaattgaaagtttgaagaaaaaatttggaactaaactcggcctgacatgtgatgagctgctgacttcctgttcctgaagagatgaggatcggctctggcagcaaaggcatgtagcagcggtggccgcggctcagcggacgcagcaggtggcgcactggtggcgctcatagtctcgacgtcattgctcaacgagattagtgaacagtaattagtatttttggttattgggttgttaggcatggtttactggttgatggtggtcattgtactagtgggtcttttggccactagtgctttattgggctagacatgttatccgggtattatccagatatttaaccgagtaaaacccatatttttgccggataacccatatccgtcggataccgtcctcccaaacctgatctcatatccgataaaaaaatacccgtattcaaacccgctacccgtaaaaacttccgggtacccgaatttttgacccaaaattatctcgaaataatacggtcgggcgggcaggcgggaaatacccgccccattttcacccctaggagcacgagaggaaggacacactcacacacaggaacaacagatcatctcatctcatgtttggtgatgtgctccccctgttcaccataaattaatctaacatattttagtaccataaatctccatttcaacgttctaattcgatagcacgttctaattctataaatctagatataccaaccgatattatattttagtgctataaatctaacatgttatatatttatatttatagttaatagaatatgtcatgttttatgctgaatggtttattttgggacgaagatattactagttttttattttgtttgttggtgatcaaccccaacccaagtaaccaggaaatggagaggggcccacgagatctgcacgctgagtcagctcatgcgtggcgtccacgaggacgtacgcggcagctcgatcgcacagtaccaacgtaaatccccaatttataattagcttcctaatcgccgtgatgcggctgtacatatatgttgatcgatcaattgctccaaggacataaccaatacgaaggtgctcgagagtcgagactcgtgtaacatactcctatccatagctacctttaacccttaaatttgcttttaaatataaatacatttttttatttcaatcaattacaaccgctcctttttattttttctcccatactttcttatctcaagcaactacaaccattcaccatttaacttcaactagtttcttaatctctgtgtatatattgtggagtactattctactggggcatattacttgttttaaaatacaaagaatttttatctatttaattatatatgtaaaataatttatattttaggacgaatgtagagcgatgatatattttgaaatgaaaggagtatttcattcgttgcgtgtatacagcacgttctgggcagaagctgtacgtaccatagagtatattattgcactgattatctcgaaagcacgtgctctctttttgataagaagcctcaccattcttatcacctcatcaattgcaagtcaaactcaaattctcccataaatatctaaacgctgtttgtgcgttacacgtgtgcagataacaggagtatttatttatctaaccaagatgaccatggccaaattttaaaagatcattaaaaattcacgctgctccaaaccaaaggatcttcttttaccgacctttccacccttgtagaaatactccctttctggatgatgcgcagtgaaaaggagaggagaagaatactccaagcatgaaaaagcttgaaaagcatgccattggccggggggcgccatgatggtgaggaccggaggtgaagagattttttattcctgaatcccacgcaaaacgcgcagcctttgtttaggttttatatttacttctggggaccgaagaagtggattccgtggcctgtggatgtattttctgaataaaagtgacgggagagaaggatggagagggtttaccctggcctctcctttggtatgggttgtaaagatttagcgtgtcatatcggttattatttagggtgtttgagcattataaaaaaccaaattatagaatttatcagtaaaccgcgagacgaatttattaagcctcattaattcatcattagcaaatatttattgtagcaccacattatcaaatcatggagcgattaggttcaaaagattcgtctcacaaattagtcgcaatctgtgtaattagttttttagactatatttaataattcatacatgtgttaaatgtttgatgtgacatggtgtaaaatttttgtgtgggatctaaacagagccttacttactgattttaagaccttggatctcagcgctgagatgtggtcattttttgaaaggatcaatttgtcaaaattgctggaaaccttagccatcggctctttgcaaagttcaaagagaaaacatggacaatggcaggcacaaagcgcgcctactggagatgactacaaatgttgtataggccgtccttggcatttgttttctgtttttcttaggggctttaattcgttctctttactccctccacgcaaattgggcgaccatcttccatccagtctcattcacccaaccaaacaaacccttattgtactaccctctctcggttctaggccctaagatatagtaatctagtatgggataagctagtatgggataaaacacgtcttagtactacgaatccctccatcacaaagtatcaacctaatatggaataaggctatgtccacatttttgcactacgatatgtgtcatctagttttagattgctatattttaaaaatgaaatgactagttagctttagaatcaggtgtaaaataacataaataattgtagcccgctgctaactacactattaatattgctcttactttgatcgtgggacatttaactttttgctacctttaatatgtgacaattaagaatctgccacttgttgtctatgacacataagctcttatgtgtctatgacatgtgggtctagtggcaaattatttatcaccacttgtaagagtggtaaatagttaataattcctgtgatggggtactacttctattctaagaataagtttatttttggccccacctatttatctcaaaataaatttatttttgagtaattattatatcggagttaaaacaaataggaaattaataagtgcataaaaatagataagaagagaaataactgtatgagatgagtaaatgataagataagcttagtattttgggggtggggggggggatacgatggatctggtcccaaattccacaatgaaacaaagccagtgtatcggttagttccggcctgtatggtacagggcagcttgatcgggtgcaccgcgccgacgaaggcagcgagcgacccacgtggatgggacgggaggccaacatgcataaaagctgtcggtcatcgccgaactgtctccgattcttcgtcgatccgatccattggttgagggggaatcgtaaactagtggtaatattctcgatgacggcgagagcggagacgttcgttcgttcgttgcctcgttgggtaggcagccacttgcgaaagtatctctacaactggaatacgtccgtcctagttctagttttcgtgcgatgcatcatgcacatgtacataagtatgtcatgtgtcaagaaagtgacggtgcctgaactggaactgaaactgtaggaacagattgaagacaaagtagtactccctccattgcaggttataaaacattttgattttggtcaacatcaaactgtttcaaatttaactaagtttatagacaaatatagtaatatttataatactaaattagtttatatatttttataataaatttatcttagattaaaattgttactatttttttctacaagcttaatcaacttaaaacagtttaaatttgatcaaagtcaaaatgtcttataatctgatacggagggagtagtaaaatgctcttgtttttggcttcatccatcgagcaaaggcagttccgatcagattgccagcgaccgatggagttggagttttggacgtcgtctgtgcgcggcggcgcttgtgggggcgctaagccgctaactagcattgtcgctggtcgatttccgtcgctgctgcctaacgagagaataaaatctaccccttgagcgtcgatcgcgcccacttggtcttgctgtgcccgctactcttccagaaagtgaagacaattctttgtatgggcacgaccactattggtttctttttcattttcttttggtcagatgcttattagcaagtagtggcgtacgtataaaattagggaaaatactgcagccatccgatcgatcatgtgcaatcatcgtgtccgccgctggggagaaagacgaggagcggcgcgcgggtcctctctctctctcctctcgccgtggacggacggccccggctttgatggatgatcgatgatgcatgcggagccgttcgtacgctgggcggtggcatgcagcagctagcgccgcaccacgacgacacacaaggagtaggtaggctagtgccactcgatcgcctcgttctccgtgccggtacctctcttcgttaaaaaaaagacaaaccctgatttctgtgttcaatgtttgaccgtctgtcttatttaagaaaattatgaaaaaaattaaaacgataagtcatgcataaaatattaatcatgttttatcatctaacaacaatgaaaatatgaattataaaaaaatttcttataagacggacagtcaaagttagaccaagaaatccaaggtttgtcttttttttttaagacggaaggagtatgaccgtctggctccctgcacacacaagcccagacaaggaaggatggatggatggcacaggcgctgtcgatttctgaatctttcgttcgtgtactccctccgtaaagaagaaaaaaaaagagaaaagctggattcttttatggaggagaatgtatttactacatgtcccacactttcactatccactgaaaaaaaagtataattctaaattataattgtatcatcgggattactcttggcacgtattcgctctatctcataatataagatattattttaaaaaaatactatttcaaccgtttcataatgtaagtcattctagtatttcccacattcatattgaagtaaatgaatctagacatatatatatctatttagatttattaacatcaatataaatgtatgaaatgctagaatgacttatattgtgaaacggagcaagtatgatataagagattatatcttgtaaagtaaataacgatgtataaaaaatactggatgcaactattaaatgaaaggttgtgtgggtggtataggtggccaaacaggtagcccggttcaacatggcacgggttgacaaatggtatggctgatgaaacagattgtgtcatgccgtgctggccacgagtctaggttagaacctagacacgaactaatgaggagccaggccctgtaagcacgtggtccaggaaggcccattagccgtataaggctcggatgatcgttataaaaaagaaaaaaaaatcaaatgaagtcatggaaatggctagggttagggttttcctcgtcatcacctacgaggctgctcgaagcaagctctgcggcggacgtcccggttgcgctgcctagcctccgcttcctgccacatcgtcttactcatcgccgacaatctctacgtttgccgatcactgccaagaagcttctcgtgctccattcctatgccaatggtcaacaccgcgtcatcactatttctctatttctggtgcccgcggaaacaactattttcccaaatcagcaaaactagggccgttggatcaacattcacatagatcctctgtaggattggtgtcctttaagccgttgagcaatttgctgatcggcttacttcccttttatctctttatttcgtagaaggcacaccaatatacaccactaccacatacgagatatttgtaagttggaccctataacacaagcttaaatcagggctctatttttagtggatttatcgaacttaactactagggtttctttgaagtgttatatgtatattctcttttgatattttaacgacttcctgtaaaattttttagatctaattagctaatatttttttctggcaatgacacggaagaggaaaaaaaataggacataacttttatacgtttacccttagcggttgaaaagcatgcagggtaaactaaaagaaaactactaccttcgtcccaatatgtaagaacctcgtatccacaattataatactataaaatgttttattcgattctggattctcatattttagaatggagtgagtatgaaacaaatcacatagaacaatttaaaattaagtttccatatttaagtttgactgagcttggagatttagctgcaattaatccacaaaacactagctatgccaaggaattggggcagatcaagattccactgtcgtcgacaaaactgagatatcagatatatatatatatattgtcggatggagtactgtccagctggagtagtagttgtgcatgattgtcggagagaaggaatcccaagcatatttaacgtcagcttagccatcgtgatcatcttcctactgcccatgacacgctatagtcatgatgcagacacggattaaagctatattagccgtcccagaaactctctcatacgctagctcgatagtgacgattagtacatagtatatggatgaaacaaaacgacgcaagaaaacgaaataaacgcacttatatatagtagtatgtactcctggatgtggacatgatatcataattaatatacatggatcgatcgatctcctggatgcatgcatgatacactgtcggcgaaactaataatatgcagtattttattagtactcttgaatgaactatgataattttcccacgtggcacatgcacaactgttgtgtgggtgaaaaccaaaatgtaatgcacctaaaagtgattatatctgtaaatatattagaaattccaacttaaatgaaaagtcgtgtaaaactccaaacaaatataaagtcatttaaattcataaaaagatccataagataatgttaaatacaaccatgtagaagtgttatccaaactctacttctgtaagcgcttgtaagatataaagatattttttttaagaaaaaacttgtcctaaagactaaaatttgttattttaatattgcataaactaaatcgggtaattgcacatatttatccaaattatttttacctaattttccctcagcaagttttctctcaaaatcatttcccaccatgtaccttgttgagataatattgaatacaaacaaagccataaatctaatatgctaaacatgcagcattagagaatgtagttgctaacatttccgattcctctgatctgtgtattatcaacaaaaaatttcactaaaaatttcggcaacacctccctccatgaaagctccattttgtagcaatggctcggactagaggaggaagaagggatatatagggcctgttcactttgttgccaaaaaaaaaccttaccaaattggcgttgctaaaatggcatagttaccaaaattttgacaggatttcttatatagttaccaaaatttggtagcaaactaaatgtagccacttttttgacgactttaccaaaatttggtaaggttgaaaatggcatcaaagtgaacaggcgataaagttggggagctttagtcccgattgataacaccaaccaggactaaaaatcacttattcccgttggagcaataaaccgggactaaaaaacctctttagtcctagactattgtgaaaatcggccgaccgagcaaaaatcacttcttctgtagtgtcatgctatctgcatgtgaggattattatttaatttaaatgactttttgatcgggatttacacaagttttcatctaagttgatgtttctacaatatatttgctccctaaaggtagtgttttattcacttgctaagctgaatgacatgttaagtcaatcgcgttagctaaaattattgaaatattcgaaaagatacaatcttttttgttctatgggagaataaagccaacaccaaattcattgtaaccataggcatggcacatctggtcctacttgtttttatttcttattcctatcaatttgataataccaaccatcttaaaattagaaaagcgccataataaagatatgcgagttacatgataacatttacatccgagagcgacacgaggaccgcgagcccatgtgttaagagtgcgacatgctttgatcagcctcatcggttgtccacatgtcctaataagtcaaaacaacttatcagagaataaaaattaatttataggtaaaacttttgtacatgtgtttttaatgacttaaaagtcaatataaaaactatgttaaaatatcttaaaattaactctaaaactaagtttgaaaatttaaattttggctttgtccaaccgataaatccctttagctctctctccaccattccgcagtgggccaatgtaaccttttctattgatagaaccaagtgcgtacttgggatatatactagataataccattgctcattttggcatgtcacccggcggcagcatccttttgtcaaatttgatcgagctacctataaaaccggcgcaaccttttgtcctatctcgatcctacagtaactaaaagctagctggaaattctagacaaaagattaacatgtgccatagctggaaattaatggatagagatgagagcacggcgaaatcgaaatcgaaatcgaaatcgacagcgatggatatatcccatccatatccgtcgcggcagtgattcatcagaacgattcggacgcacgcaatggttcgaaagcgatatcggcggtggttatacttcgtgtgccaaattttttttaagtatacggatacacatatgaagtattaaacggggactaataacaaaacaaattacatattccgcctgtaaactgtgaaacgaatttattaagcataattaattcattattagcaaatgtttactgtagtatcacatagtcaaatcatggcataattaggttcaaaagactcgtctcgcaatttacatgcaaactgtgcaattggtttttttctccacatttaatgcttcatgtatgtgtccaaacatttgtcgcgacaaaatttttagaagtttaaagggaactaagaactgccatcgtatgttgaatgggaagacaaaccaaatgttgtaactagctgctgcaattttctaccaaaaagcgagcatgcataccaagcgaaaactggaaatttaactaaaattaaaagtttgaagaaaagaattgaaagtttatacgtgtaggaaagttttgatatgatggaaaagttgaaagtttgaaaaaagttagaaactaaagaagcactaactgtcatgtatgtgtcaaaccgtcacctagatgaacatgagataggctggttacctaacatagagtcaattatatgtctcaccttgtcgttttcttctgagagagatgatgaactgtacaatacgcacatggcaatttgtgtagtagttgatggttgtggacaaaataaaagcaatgattctatggatttgggcccattggaggtgaccggccaaccgagctggaactggaagcccagtagcccactttctttctagggaaaagtacaccgaaggcccctcaagttgtcatcaagttacaaaatcgtcccctaaccgcaaaatcagatatccggtgtctcttaactaatcaaaaccggtcacaataggtccttcaatggttttgaccccggttttgttctacgtggcggctgagccagcttgggatccacgtgtgccccacatgtcagggagccacatcatctctctcccttcctcctctctctctctcactcttctcttctcttctcctgttctctgggcaagtcagccgacggctagggaggaggccgccgggacgaggcgggagaggacgtggcagcgggcgacacggcgatgggtgacacggcgactgagttagcgtgggacccatgtgggcctcacatgtcagcgtggccacatcagcccccctctctcttttcccctcttctctcccttcctcatctctctctctcccttctttgcgaggccggtagtgaattgtgggagaggaggagggcgtcggtggccagcgaagggcgacgcgtcggcggtgggggaaggagctgcgggcggccggcgggggaggagcagtgcgcgggcgacggggggaggagcgacggacggcggagtggagttgggcggcccctccgtccctgccgccgccgccaacacggcgctcgcggcgctccccttcccgtcctggtctcctccgccgccctcgactcgctccccttcccttcccctgccgtttccatccccacccccgccgccgccaccgcccacctcgccgtctccgcgcccgacttcgacgccgcgggggccctcttcgcgtgcctcggcggccacgtgcaccgcacggtcgaggagggtggggcctccgtgctcgcctccgacgaggccgatgccgtgtcgtcgctcgccgccgtgtcgcccgccactgcctcctctcccgcctcgtcccggttcctccccagccgctagccggcttgcctatagaataggagaagagaagagaagagaagagagagagagaggaggaagagagagagagaggagggagagagagagagatgacgtggcagcctgacatttggggcacgtgcgggtcccaagctaactcagccgtcacataggaaaaaaccggggtcaaaaccactgaataacctattgtgaccggttttgattagttaaaggacgccggatatctggttttgcggttttggacgattttgtaactcgagacaagttgagggacttcggtgtactttttccttctttctaacgaactatggcccatgttagggccgtcctcttcatcagaaaataaaaatatgtgataggaagagcaaacatttgcaccattccagcctaataagattaatcaaatacaaagccatagcttaccaaagaaagaagcagtagctctgaatcaagttgatgttgctgaatcggaactattccttctgaataaaggtaaaacataataaactgacttagttcggtggcttgagctcaaggttctggcaatctgtggcttgcaagccatcctctgtgagtctgtgctgcagtatgaggtactcaagacataataaaacctgtacaaatttaacagtttcacaggtttctttgtacaatatccacatcttctctacattgatcaacagctaccaaaatccttgccccccttgcttggtgtagcatctggatagcaaagctttaaattcaggattaagatgtctgagagcacaaggttgcaactgaagaacacaccttctgaattatgcaaatatagagtgtagctttacgtgactagtctcagaattctagtaatcgttccttgttcctaataatacatgttctgttatttatcacatatctgtagaaagatcggtgagatgtcagcagtttcaataggagacagggatgcggactgaaggtggaccggatctcatgtcctcaagaatgaggttgaaaagcatctgagcaattgggccttctttgcctgtgttagaacaaggaaagaaattagcatgaagtttacaggaagccattgaagggctaaaagccatccactttctgttgcagagtgcaaaatgatactcttccaaacaacgacagctaggtgaatttcaggggtgaaattctgtttacctgagccaattatctgatcatcccactgaacaacaggtttgacaagaataccactaccaatgagcatcatctcatcagccgccttcccttcctggacactcacattccttgaactgatcccgctgagccttccatctgccactagctgcttggcaagggtcagaacccgttttgccgtgcacccgctaaggatcttgtcgaaacggggcatgaggagctccttgctttgtgtcacgaagccaacattcatgttggaaccctctgctacgaaaccctcatcatccaaccatatgccggtgaatccaccattttcttcgccttccactttagtgagtgcatttggcaggtagtttacacttttcatgaccgcaaactgttgagattttatcggtatcgatgatgtgatcaccttgcatcctgctggtactggtaacgatggactttcaatgacaatagcatacagggctgagtttgcacaaccagctgaagatagctggaagtctcctggtccaacagatagccagtacctgagtgatccttgggtgcattttgatgcactcacagtttgaataagtatgctccgaattgttgaccgatcaaaaggcagcgtgattttggccattgatgcagacttcaggaagcggtcaagatgctgctctaactcatagaggtgcctgacagtaatatgacaaagttaatactgataatatggtgtttggatcagaactgaatggaaatttagtaaaaagaatgatcccttcttgttcacttacaattttccacacactaaaaaaacaaaacaaatttcctattgatagtcaagtatctgtttttttgggggttggcataattgattgaagcaaagatctcacccattcataatagctgcagtatcaaaaacaccatgtcctctgtggaccatgtgatcatcgattggtatcaccattgcagaaggatttgtggtaattccaccaaaaatactagagtacatggccatgtaattttgatttctggttccagatgcatggaattcatcaagcctttctgcaacctataagagaaaaagtttttgactttacatatctgttgtcatagcacttttcaagacaagatcctactctgcttgataatttcatgaatcgtgagcacctcttagacagatagtaaaccacatactgttatgaataccccttctctctgaaaactagtaatacttgtaattaatacttcaaagagataggaaacacagtaatcagcatgactggaactatatccaaagatggaacttgttaaagggctcaattcagattatcagtgttttggtgcataatttaagttattcagagtcctatcaaatccgattgtgttaaactgcaagatcaaagttactaaacaaatactcaaaggttgtcaccagttaccaccctcatgtcaactactaggacatggcttcaactaggacttgttggacattcttacctgtagcaatataaatgatgctagaaaatatacagagttaacttctttttagggaaaacagtagtcctactttggtacatgattattaaaaagatacaaatatatttacaacaaaaaagaagattactccaaatttttttatccgattctccatataagggtgatatgttgtttttgctcttgaataaaaagtcagcaatgtaatccacaaatgtatttgcacactactgtggactgttaaaccgtagtcaacttaaaaaaagcctagaggaaacagtgttttgaaacgttgggctgctctaatcatactgtggttgcagcaaaatggttctaaaaaatcttaatacatactagtatggatgtaaattgagtggatgataacaatgtactatatgaggtagataatcaggtatcagtcaagtgaagattaattaagacaagaggaatggtaatcagaacaagacgatctctctaaaacaaaaggagaatccaacttcttcttgcaaatattgtgcgaagatggtattgaaagtggtgccaacaaacacagaaaagacaaggaagtccacctcagcaaaagacaagagagggacatcatttccagtgacaatggtctcggctggtgctgcagtgaaaagaataccgtttagttgcatgaaaaacattattgaaaacaaaaggcatcatagtctcctagaagcacactatatgaagaacaaagcaatgatatcagagctaaaccgaggaatcattaaggtgagaaaaacaaccatgcaaggctcatttaaggttttgaaaatcatattttaacaaaaaaatgtacaggtattttcctatcaaaaaaattctatcaacaaatgccaagaattgctttcaaaactagctaaaacaaaaaagaaagaaagaaaaaagcaccctggcagcaaccttaaagtcaacatcaaagggcatacctcatatttaatcataaagatacgatctttcatattcacatcagcccattttgcatatatccaactatttcaagcacatccagaccactaagaaagcgacagggaaccatgacaaactgttacaatcttgtgaactacaaattgcagttttttactaacgaaactgtcctcgcattgcatcagcccaactctaaggatcatcatcagatcgggtcactaaaccaaccacggaatttcatcagcatgagaactcagaacgcaaccaaaatacctttccagccttggaagttcactgttattactaaaaaattcaaaagcagttgctcacagaagacctataccagggaaaaaaaatatccacattcccccaccactccatatagagttcagttcatcaacctatgaacacacatgcaagtttgacagaactatgaacaagcatgcagatttgacagagctatgaacaactatgaacagacatgcaaatttgaagagcagactgcatgacagaactactgcatgatctcctggaatcactaggatacttttcgaacttatgcaaaatcttagtaccccaatccgaactgggacccgcaccaacaagaatgcagaatgcaagtaccgcacttatatccattcctccattatcctgaacctgaagctgcaaactgaggagctggaacaagcgggagtgcaacctttagcctcagaattcagaactgatagaaggatttagaacaaaaaaaagtttccatctctttggctccaacctaaggtaggagatggcaggcgcaagaacccgatcagcactagaacccaacccgcgaattcgagcagaacccaaggaggaagactaaccagcggtccgattggagctcgtggctgcggtggccaccgccgccctcctccacccgcaccatggagatggggtgagcccagcagccttcttgtacgcgaggagggaagggcggggcgacggggagacgccggcggtagcaggtggggtggagagagaggccatcatcaggacacacgggcaaaactgcaggaatggacagactctagtctcaggtttcagatgctgccggcattatactggtaatgttttttttttcctgcagattgatgtgtcaactctcatcaatgaaagcatcaaccctataaaaaaaacaaagaagaagcatcaaccccatcactagagaatgcatgaaaattcattgaagaataacaacaaaaaatagttattttatttagtactagttactactccctccattttatgttataagatgttttgactttggtaaaagttaaactgtttcaagtttgactaaggccatgtttctttcagcttgagattattataatccagattattgggagtagcttattataatctgataaggtcatttaggtgagctttttctagattattgggtgaaaaattacccaccatgccaccccattccctctttagacttacaaacccaataatttaggctctaataatctaggaaagaaacaactaaccgcttattctactacagattataacaatctagcttatagtaatctgactcaataatctagattataataatcccaagctaaaagaaacagggcctaagtttatagtcaaactgtttcaagatcgaaagccgatacagccccgcgtcaggtgctgagtacggccggatgataagtaaaaacctcggtaaggagggtggtgatgcgccaatagtagttgtattgatttgtgagatagtttacaatgacctcgagtgtgcatatttatacctatgggtagatactagtcctggttggacatgaaagaaactttcctaaagataaaatgacactctcctaaagatagaaggaaagaaaactaatagactattcttaattaatagataaactgccatgccacattctccttgaactcggtctcttctagataaacttcctttaattgattaatttccttaaccgaatatagcaagaatctgactattggcgacttgatgattcctattggccgattccaggactctaaagccgatactgactctaggccgatgatgacttcgggatttaccaaatttcgctgttaacacacggtcaatatgttgctgctactccgagcagtccacgggggccgagcttaggtgcaagaggcggctgtgccattagctcgaggcttggcccgtcagaggtatgaccccgagcttgggtcccgagcaattgcagggatgaacttgagctcaccctcgccagaggatgggccaggttcttgtttcacttctcttttgttagggctgacgatggttgtgccgatcacccggtctgatggtgtgtcatagggcgccccatgcagttggttgaggggtcttgggtcccatttcattgacagattgtatttttagaattggcattcatcgatggtaaaacttagaaccacacatatatatataaatggcatttcttggatttttaattttttattactttattaagttaatacacataataatggcgtgtggcaatgcacggttagagcctagttttttaaatttattttggttatctagattattcatgccacatatacgtaataaaaccaccttcaaactagagcgaggatgtaacttagactgtttttttaagttaaaaggatgtaaattgccagatttaaaagtcgaaggatgaaaactagaccaacgcaagaggacgtggagtgaatttttttattttaacatttttattaaaatatttttaaaaataattttttgttttaaaatttacaaatttgatgcctcatgcccttgtaatgggcccttccagacggcgttaaagtttctgaatgtaaattctccaatatagctcattagctttatgattttataacttaaacgtacataatataaacttggataaaatcaaaatttatataaaaattgtagagctcgaagagatctacaactttgtagttaacaacattttcatttaagatcatttagacatccaaatattcattagaaactctaaaacctattttaacaaaatcttagatcttcattttaaatgagataagatggagacaaactttatataaaagttgacgatgatgagatctacaactttgtagtttactacttttctatttaaaattatttggagtaacgaataagcattacaagttttttgagcaattataaccaggtttgaatacaaataaaaattttacatttaggccacataacgccctttggaagggtgtttttttaaaacgttgtcctagagggcaagaagcatctagatttgtaaatttttgaaataaaaaaatatttgtaaatattttaataaaagaatgtaaaaataaaaaaaaaattcgagtagacatccctttaaatagatggaaggaaaaaaatggcagccttccagcagcagtaacaacaagccaacagcagggaaaaagtctaattttactatctcaatatagattcaatgcaatttgtatccctcaaccgtaaaattgtaccctttaactattaaaactggtgcaaaatgatcaaggaaaatgaaaaaaatactacgtgctcaatttgaattttcccagtatgatttttttggattttaataatttatagaatttcattttaaaagttttttttatttagggtgaatttccgggcgctagtcacacatagtcaatttgttccctcgctatgcgcaggtcttgatcaagcaatgaggatctgaaacctccattcgagactaaagtttagcttgagaactaggtcggtagttttatatatgctatttttaaaatacgtaaaatggttcatgtattgttgtattaagagaagagtacggataaaaaaacttgccgccccatggaagacaagtacccaacgaaaacctttaaaacgcgatgtctcgcaaacattgtgtgacagagcgaacaaccacggcactataccttagtctcggctagcatccgttggcgcacttcctccgcgatgtccacgattagggctatccagctcctctcgcgttcgtatactgttccttccaaattccccaagcgattaagatcacaagcgtgtcgaaaccctgtggattctgtgtctttactttgcatctagcctccatccaccattgatcaaaatctggccggttcgaagggaaacacaattgcaggttgaggcagttgaaaaatcctccaccaaacctgtcaagattccgggcattgggagagaacgtggtcgatggactccagcacttgatcacagaagatgcaaaatccatgatcccacgctgtaccagcctccggaagttaaagaaatcaactttgacttgattacagaagtggagggggtactagcacctcctccatttttctgaaaaacaaattaccgtcacatattgcaaggagtgaaatcaagttcaagttccatatttataccatctctatccataacgaatacactacaggaactaccataaaaatggtgttaacttcaacttttaacatgttttatacctacttgatataaacctccaaaagacaagacggatgcctcattgaaatgcaatagattatagatgtaaagataacgattgcatatggccaccaatctccggatcttgtaggacaaaatatgtatagcctccatattcttgaggggactatcaaacttataagtcagaagaaagtgccgcacaaatagaatttaccaaagttagcatttaaatatgaaggcgtaacaatattttgtttcagaaccaaaagaatcagtgccacaagtaccccacagatgtgtgcatattatgttcaatagcaaccaagtttacacagtatgttgtgtgaatattgctactatagtacagaagagtactgcagtactaaataatgattaaggtagaaattatcgggtatggagagtttgacccttgctgcaacagtacaaataactccccaaagcaaaagcagtatatatataattcaaaattaataagttggcaggagttgagaagcgaggatgaaaaaggttttgaaagtttctaaaatggacaacgaatagaagcctgataattgatcttgcagttaaaagaaagctctgatgagtgacatgagcttaaaaacatcacttaacaaaagccctgcccaaaaacctcacttaacaaaagcctagcccggaccatacaccctgatattgctgctttagtttggacaatagagttacatttcttttcgccgggccggcaaagatgccggccgaagtatattaagatagagcaaagaatgtacattattggttacaagcagggccatcccttttaagagaggcaaaaaagtcgtcgctcaaaggagatggggagcaaacacacaaaaaacctctcccaacagagctacaacaagccttctcacggaggagggatcaaacctgccgccagccacgtttcccattcatccttgatcgtcacgaacagacaggccggcgaggattgaaatagatgaggattggaactcttatattcagatgatatcccaaatccatgatttttcccctactttacctacagtagctctatctgtggaaaagttttcttttctatctacatatggatgtgttctatcaaagtcataccaagcagttatagtcaaagaatagctacatcaaatcaataggttttcttttttctagctgctccagtgaagaatgctaatcacttatcaatataggtaagcactgcaccttctatattttaacacatatccatattaaggatatattgaggatattgcaagttaattagctagcttttcttcagtggtgatcttttactagtacttaattcatataaagcaatttatcattctctacaatccactggaggcaacactgcctaaaggattgttttctatcacttccaagttttctccaggatttagcatcagaattagccaaataatgtttttttgaaaagaaattagcgaaataatgtggaatgctaaataatgttccacagtggatagcaccaagttaattcagtgcaacaccagatcaaaaggtaatgttcagtaagctttgcatgctttggttctccaactaaacagggagacatgacaaaatattacaatcttgtgaactacaaattgcagttttttttttactaaagaaaccggcctcacattgaaacagcccgtcactaaggatcatcatcagattcaatcactacaacaaacagccatggaagtttatcaacacgagcacatagaacaatacctttccgcactaggaggttcatcgttaaaactaaaggtttcaattgatccctgagcagcagcatcaggaaaaatatctacattccccatcatttcgtctgcgtggcaactaggctgaacaacgaaagaaggaaaaacttcagatcgatcactgggagtgggacatttcagaattgatgcataacttcaatacgcggctaaagaagaattaatgacactaatatccacttctccatcatcctgaaactaattaatcgctgggagtgggacacttcagaattgatgcaaaacttcaatacacggctaaacaagaattcatagcactaatatccatttcttatcatcctgaaagtaatcgctggaggtgggacacttcagaattgatgcaaaacttcaatacgcggctaaacaagaattcatggcacttatatttaaatataatatccatttcttcgtcattctaaaactacacgtcaagtgcaagcgtgcaacctttggactgagaactgatagaataaatgacctcagggagtcaagagttcagaaaagaaaaactgaaaaatcttttcagctcgaaccaaccaaaggtaggagacggcaggcgaaggaaaccgataaggtgatcagcatgggaacccaagttccgaatttgaccagaacccaacgaggaagagagtggatgtaacaatatactgaccgatccgattggagcttgcggcggcaccctcccccacccgcaccatggagatggagtgagcccggccaacggctgtgctccacgtgaaggccggggcatcaggacacgcggcaaaactgcaggaatggatggatcataatacaagtgtttttttccctgtctcagctctcgttaaactataaaaagacaaggaagaacaaaaatttttattttttatttattttattttttatttattattattattattattattattattattattattattattattattattattattattattattatttatttagctgctgctgctactactggctaaggcacagcaacgctagcctactaactcgtacacgttccaactgacgtaaccgtagcacgaggcccgccaagaatatcagcgcgacgcgcacggccacaccaccgccactgctgctcgtcctccttctgggaggaccgaaggaggggatggggagagagctgggatccggtgcagcgccggcgaggaaactgggtcccgcgtacagcatgtgcggcccctcctccacccacggcacgcgcatgccggcgcaccacttcttccccctcttcacctcctcttcttctacttcttcccccctcgccaccaccaccaccaccttcttcttctcctcctcatcattcttcttccccagctccggctccggcgacccaccgccattcctctcctcttcctccctcctcttcttctggaggtcccaccgggcatcgtccggcgaacctcgggtcctcttccggaggtcccacctgtcatcgtccggcgacccgccgccgacgcgacgctgcccaaagtcccacccctccttcttcctcaggtccggcgacctcacgccctcctccgccgctctctccttcttcctcgcgtcccaccgggcgtcatccggcgacccaccgccgacccgctcgtgcccgaatccccacccgccacgcgccctcccgaccaccaacgccgccatcacacacacacacttacctctctgggcgcgcagagaagcgggaagcggaagctcgcggaagacagacacctgcaaacctgcacaacagacaaagcaaacacgttataatatccgaggagaacttgtgtgagctgatccaccttttaaattcataactgcgttcataaaccggcgaggcggtactaatcaaatactacattcgccggcggcggatgtcgtcggaggtgccgagagcacgggcgcggcgtggagacggagcgacacatatggcccccgagcgaccagagaaggaggagaaagggcttggcgccgcgccggcgcgggcgacggctgatgtcaggaaggagaagcctcgaccggcggcgaactcctctcctctctgtctccggcgccgtcttcctcgccatctgccgcctccctaccttcatcaccgtggaacggcggccacaacgaaacagaatccaccttttatactgatgtacgcctccgatcgaccaggcacggaccaccgtcgaggtggtgctaatacggtgaggcggcggcggaactggaactaggcgaaggcagctcaggcggacgggatggcgaagtgatggatcgacgaacgcgcgggtacggcgcctcgccgaagaagggcgcgagagagagtgggaggaagaggattcgagagatgaggaagagagagtgagaggaaagaggaagaggaagaggaagaggaaggaagaagacgatggagctgacaggtgggcccgcgccaggataaggtcgctgacgggtgggcccagcaggaaggggatcgtggagcggagatgagcgcgagtgggccgcgggaaggaggcggactgggccagcggctgtggcctgcgagtaagggaaggaaaggaaaaagtacaccgcaggtccctcaacttgtcatcgagttacaaaatcgtcctcgaaccgtaaaaccggatacaacgcatccctcaacttacaaaatcagtacaaaataggttgctcggtggttttgactccggttttatccgacgtgacagctcactcaacatgggacccacgtgggtcccacatgttagcctcttcttcccctcccatcccctctctacctctcttcctctccctcatcttcttttctctcaggctcagcagcgcaactggcaggtggggactggggaagggggaggcgagagtccggcggcagtgacaaggcgacgatgcagcggcggcgacgacgcaggagcaggagggcctccccccacaccaccgtcgccgtcgacggtgtaggcaccagatcccgccgccacaggcggcggtccatggcggcgagacggattgaggacgtcgtgtgccggtcccgcgccgttggcagcggcgtggggggaggccctcctgctcccgcatcgtcatcgccgccgcctcgtcgcccgtctccaccgccgccttgtcatcgcctcttcgtcgccgccgggtcgtcaccgccgccggactcccacctcccccatccgccggctgcactgctgagacatgagaaaaaataagaggagagaggaagagaggtggagggaaagaagaggctgacacgtgggtcccacgctgagtcagctgccacatcggatgaaaccggagtcaaaaccaccaagaggcctagtttgcactggttttgtaagttaagggatgcgttgtatctggttttgcggttcaaggacgattttgtaaatcgttgacaagttgagggacctttggtgtactttttcctataggaaaaggcagtgtgggccagaagggaaaggaagggatgggggcccaaacaaatagtggcctttgatattttccaggaatttgattgaaaggacaatggactagcaaaatgcctggttgcaacaggacgtctcacgaaaataagaagcgcatgaagcgtggtctggcacaaacaagtgtaacgtgttatctcgtgtcgcatgggaaccaggagtgcacactttgtttcaattggcaggttgaattaaatcaagctttgcagcagctaaaggctgaagccacaactaattaatggaaatttagaaatttctgatgtcaaatgtgcaagaagcaaacaataccggctagtgatcttcataagtactcccaagagcaaatttaatagtatatcccactactagcttcaatacatttatagccaatcaaaatacccattagacacggctccatagcggggctgtgacgtaccagcccgcgtgtcactttcgaacctcgtgcaagtgagattgggctacggtgcccaacgccctgcaggagcgcagattgggcaagactagcgggacgcgcgcgggggatttggtgagaggacggtaacgcgcgcacgaggctgcggcaggagcacacgctccgcatgagcccattcgccctgacaggcggcggcatgggcctgccaggccaatgcgtatcgtgtcgggccatgtcggcctgctacaggagtcatgccgtgccatgccagcccatgggctgcagcctcggcccaggcacggcacagccacccgttccaagcgggaaaaagtccattttgcctcccttaaaagtcggccgaatctaattcgtgcccctcaaccacaaaacaggatagaacgactccccaaaatattgaaaccggtatatttgactcccttcgtggttttggagggtggtttcgctgacgtgacacttacatggcagtgttgactggttcttcttcacacgtggcgttgacgtggcgcctatgtaatattagaattaaaaatagatgtgtgggacccacatgtcattcacacaccaaaaaatacaaggacccactgactgtggggcccacatggtcctcatctccccaacgtttcttcccccttcccctctctccaacggtggcgacgtcgatggcgatccatgccatgtcacagctggatggcggtgccgacgacccctccccgtcccccaccccgggcgcgaggatgtcgccatcgcggatcttcgcggggccgccgatggcgcgcagggtggccgacggctcctccaccatggcgaggggcgcacggggtggacgacggcgaggggtgcgcgccgcgcggggtggcctctctctccctctcccgctcacttctctccctctcccgctcacttctctccctctccctctccctctcccgtcgctggcggccgcggagtcgtcgccattgcggatctttgcggggccaccgacggtgcgtggggtggccgacggctcctccaccacgacgaggggcgcgtggggtggacgacggcgaggggcgcgcagggtggcctctctctccctctccctctcgcttctctccctccctctctctctcccgtcgccggcggccgcgaggtcgtcgtcgtcgcggatcttcgcggagccgccgacggcgcacggggtggacgacggcgaggggcgtgcggggtggcctctctctccctctcccgctcgcttctctccctccctctctctctctcccgtcgccggcggccgcaaggtcgtcgccgtcgcggatcttcaagctgctccgcaagcgcgcccacgactacaactccgacgactccgacgacgagaagcgcctctcggcggaggatgaggaggaggaggaggagggggcctccagctctggtgacgacgaggccgccggcgccgtcgtggcgtctgaaggggaagagaaaaggaggagagaaaagagagagaagggagagagagggaggagaaaggatgacatgtgggccccacatgtcagtgggtcccattatgttttttttaatgacatatgggtctcacagatatttttttaattctaatcccacgtaagcgccacgtgggacgaagaccgggtcaacaccgccacatcagcgtcacgtcagcaaaaccaccccccaaaaccggtgagggagtcaaattgcactggtttcaatagttcggggggtcgttctatccggttttctggttgaggggtacgaattagattcggcctacaattaagggagtctaagtggactttttccttccaagcgaggtcggctactgtagcagtgtgctcgggccggcccattacagcctagcccatttggctagctataggcggacgtgcacactcgaaaggagtcagatgacgaaccaacggggggctgagcgatcacccgcaccccccctccccctatacgtccctttctcccctttcctcctccctactacagtacaccacaaaattatttaaaaaaaacaaaagttagacaaatttatgtaaagaaatattatatatataaaaaatttgaattcaaattcaaatttgaatcggatatgtaaacttttgacttataaactttggatctataaactttagatgtatagaaatactatatatagaaaatatttgaattcaaattcaaatttaaatcagatataattcaaattcaaatttgaaacgggtatataaacttttgacttataaactttaggtctataaactttaattttagatctataaactttaggtctataaactttagatgtatagaaatactatatataaaaaatatttgaattcaaattcaaatttgaattcaaattcaaatttaaatcagatataatttaaattcaaatttgaaacgggtatataaacttttgacttgtaaactttagatctataaactttaggtctataaactttaaactttagatgtatagaaatactatatataaaaaatatttgaattcaaattcaaatttaaatcagatatataaacttttggtctctaaactttagatgtgtaaacttgaggtgtataaactttaggtgcataaatttactaaaataggaaagtaatgcggtgccaaaaaaggaaaccaggtggagggagagaggggggaggggggagggggaactgatcgctggtacatcgccagggcgatcgatcgccaaacaggatttccgaaccaagggtaggtagaaacagaaattgcgtacccgtacatagacatcgtatcagaataggatgatataccaaaattttcgatagaaacatcttcagtttttataacaatagagatatttgattttaaatttgatatttgaactaatgaaattagggggaagctaaggaagtgtactcaagggaagagattgacatttggtggataattttgaattttgagaggagcaagttggaaggattggagggaaattggaatcccgagattttagcttgaatgggaatttttgtttgagattattggatctgagaaaggattttatttgagatctttttggcacttagatccttaatcacacaaagaatcactttttttcgaaaataggacttttattaaaaaaaatagttttcagtggcctaaaaatcggggcgttgtcattgaaatacaaaattgtccctgaaccaaaataccatatatatatatatatagcatccctcaacttataaaaccgggtcactctaagtccttaggaaattttgtctccagttttatcggataaaaccagagtcaatgccgccatgtcggacaaaaccacctaaggatttaaaatgacctaattttataagttgagagatgcaatatatctgttcttttttgtccagagacgatttgtaactcggcgataagatgagggaccttaggcacaattttttcttaaaaatatcagataacttgtatgcctcgggcttatttggggatgaatctgacaagtggatcccaaccccacctattagcaagaggtggcaaaatgccgcgggtgagcagattggccaatccaaacctcacttggccggcaaaagagtggagtaggggagggaggggcgggtaggctggcctgttggcggccgtgcacgtgggaagggaagagggagatggattgggttaacggcctaggaagaggaagaggattaatataggatttgtattttaattaatcctaataattgatttgattgattaaaaatagtttttccctataaaatttcaagtaaaaatctagtaaatgctttggagcatgaggaaatttataaaaaaaaatacacccatctatcatggattcttatttaaggatttacgttctcctttaagtttttaaacattttctagaaatgtattattaagtgattcattaatttaagggataaactcaaagcgatacatccatggatttcgttggcgtgggtggagggcgtgagagatatatgaggagaaggagagggagggatagatgcttagatggtgctcttagggactttgatggcgctggatgggtggatggtaacaaacggatatacgtacaattaggaaagaaagagggggagggacggagaggatgatgaggttgagggaaaggaagagtgaattggggaacagagagaaaaccgatggatcgataaagaagtgttagggtgcagtggctgctaaattatcactcatcctcgatttctatagacggtcggtgatcgtaagaaaatccgcatacacaaatcgattggctctaagaaaatctatcttgggaaaatatcgattttgtagtagcgaaaataaaagaaaggaaattaaaatgactccaaaagttattaaagtgagcaatgtgtactaaacacagagagacatgtaaaaggtatcgtagtgtcaaggagcagttgcatgctgagtggactccatgaattgattatgcattgcaaagtcgtcgatcgccgtcttagtcggtcgtggcactagacaaaagagaaggtcacgccgtgtggattaggttgccttgcctgtcgtcgtcaacgccgtgcatacatgcattatatttttgctttgaaattgcccgtcctagttattgactctattattaaccagtgtttttaagcattttggcaggcaggagaatggcgacgttgcattgcatcgcattcattggtcagcagacaaatgtgaggtcaacctggaacagggagacccgtgttgttgctctccaagatcatcagagacaagccaatttgatggatatgtttcttttttttttcttttgaatgtaactagaaagatggcccgcgtacgcgcgggcacttatattatatttattgaaaggtaagattattgtttatttagaaattttgtctcatagattcagggtaaactttagcaaactaaagtttggataatattattttatactccctccgtgccctaatataagggattttgatattttgcttacactgtttgaccactcgtgttattcaaaaaaaattgttcaaatataaaaaatgaaaagttgtgcttaaagtactttggataataaagtaagtcacaataaaataaataataattccaatttttttaataagacgaatggtcaaacaatgcaagcaaaatgtcaaaatcctttatattaggggacggagggagtaatagtttaagggttctatttttcttaaggtatcttaaaaaaccattcacaacttttgagtaggagatggattaagtagttacgacttttgaatcatgttttttttctcgactaaataagaaactattgctagttaattatcataccgtccatctatatacataccgtacgtgtagtatggctgcaaatgaaaaatgcgagtgtaagatactcaaaattattttgattaaatcgtctcatgaaggcgcatgatatagtaataaatggagggaagtatatgcatgggataaaaagaagaaagagaaaaatgaaaaaaagggaggggaagcgtacgtacccgcgcacgtaggtgcgtacctatgccgaggtgggaccttgtagtatttagtttgttctaagatcaatttaatctaacggtttataatattggacctaccgatttaagtgaaaatcaagtaatagatactttgattttttttccttagaatttctaatatttgccctaatttattagagcgccacgtggcagcttgagagcattttaaggaattttaaataacttaacacgtgtaattagaatattaactgcgcaatatatatgtatgggacatatggtaatatttgttccagcttcgtccatgtttatatacacgtagagagaaattaattttgtggctagcaattaattttgacacctttagatgtctaattaatagaaattaattttgacacttatttacaattgttcagagtaactcttacatattcatcttatgactttgatgatccattgatcaccaatttactgatcaccatgactcgcatgaaaataaatgtagtacttaaggtttaggatgaaattgatgaattatataatttatgtgatagctatttgagggtataaacgaatgaattgacttctaaaaaaattagaatgttgtttaaagaagacaccatttagaaacttggaaagcgtgcaaacaaaaatccaaatatagaattgggaaaaaagagagggccttgaactccctttatcacccttgtcgtagtaagagttctattgatatccatcaatattgtgctcacatttataacataataatttctttcacctgtacgaacaaatagtaccaaatccaaatacgacataacacaaatacattataattataattattacgtaatcaactctcggtttcaacttaaacagagctaattagtgttgagaaaaacacaacccatagtacttaattattctctcgctgcatcacacatttaattttcttttcatgttattaacaaaattaattatctccatatatgatttgatatgtagcaaagcggtagcgctatagcggttgtgatcactttagatgtctcagacactacgctttgtcacacgtgcgaaaggcaaaggtgcaggcgtgcattgtgcagcgggcaaaaagagaattttggacgctttatttattagcaaacaattgatccgatgattataataataggtccaccagttatagggtaagtgtaaattagttaatatagattttaaattgttaatttaatgggtacataatataatggtgtagaccttattttgaaatagtggattacttgagaataataggccaatgtaataaaaaatagatccgatgatttatataatggggccatcagtttaagtgcacgtataaattagttaatatagatattatttatttgataggtacacgatataattgtgtaaattttattttaaaatagtgcattatttgaaaataatagtgcaaagtaaagagtacaccggtttaagttatatgatggtagattctttgttgtaaaattatgattatttaaaaaaatatatccattatatatatatatatatatatatatatatatatatatatatatatatatatggtagaaagaagaaaaaaggaaaaaaaggaaggaagcgtatttactaccatgtaggtacgtatatactccacctgccaatgcgcgggaggaggataggtggggcccatggtatttagtttgttttaagatcgattttatctaacggtgtataatattggacccaccaatttaagtgaaaatcaagggatagatgttttgcttttttttcttagaatttctaggattttctctattttattagagcgccacgtggcggcttgagagcgtttgtaggaagttttatggtcttttagtatataatataatataatagaagatagatagatttccactacctgtctttccttttccatttctctccaaatattttatttcagattttatgtactgagatttattctataaaaataattttgtggtgatgaatttctctgaagaatgatctccacatgcatgtttaattttggatgactatttaacaacccctagcatatatacgatccatctaaagaaaatcgtcaatgtataggttcttttttcctctcttgtactccaactttaattgtagttttagctcagcaattaatggagctagctttaccatctccataatttcccagctgactgatgaactataatttctcaaatataaattagtaaatttcacaaaattgcatataatttgattgatatattgcaaaagatatgtatcacaaaactatgatttatcaccaatttttcaaggaaactatataattaaggcattgcaaactatagattaagcataattttatcagaaaactacagttttttgtaactttagaaaaaacaattgtgctacggacctataatctaaaatatgtaattcattgataacttcctcactaaatctatttttttatacaatgacttaaatttataattttacaataaatttgatattaaatttgtagttctgtgatttatataattaaatctgtagttttcgatagtttggtcaaatgtttgtagttttgtatattttagtcaatataacgagacagcggaagttttacttacgagtttcgacctatggagtaattagaaatgcatataaattgaaccgacaaataagttagtagatacaaattctgtcatgtttcctagctagcatcatgtaatataaaacattatgctttttttaaccattctggcgtaatataatatacaaaacttctactccaccttacatcacaaataactaacttacaagatttagacatgacaaaaattcaactacatcacaccccaattggacacacataatttatgcaaaacactgacgacattacagaacatgcactacaataaaatctgcatgattggtctaaaaattcccctttttcactcaggcagttaaggaaagaaatagaaaatggaaaaaaaataagaaaaagacagaggaatcgaaggaaaaaagaagggcgcagtgggcggagagcgagacgcagagagacgaatgaaaccaacccaaacaaaaacaatcagaagcagacgaacagcgccacggaattcatcgaaaaaaaaattatcgtgctcgccgaaagccggccgctttgagaccatccaagaaccgcgaatccttcctcccttcgacgaccttaatttcctctgccatttgagcccgccaaaggtcgccgtttcttggctctctctctttttttttttctctaggagagattttccattttttgtggccaagaaaagggttcgattttttttgggggttttctcgtgttcttgggttcgcaggcggctccggtttcggattttttggtaggagagttggttggtttccggcgagggggggagcaggatgccgtccgtgctggtcgaccgcgcgacgaacgacatgctcatcggcccggactgggccatgaacctggagatctgcgacaccctcaatcgagacccagggtgaggaaaatagaaagattattcgttctttttctgtattttgttcatgcggttttctttctttactgttgtattggttgagaggcgtcgcattcgttagcggattttgttgattttggtgagggttccaccttttgttttctccgtcttgagcgaattctgttctttcttattggcggtttggctaattttcttcatgtttgttttggtattgagacaaaatatttcgtaattgaattcagtgacttttgattgattcgtgtgagttttcgatcgaaaagtacgtattctgtttcattgtggattatcctgtttgggttgggaatctatgtgttcagatgatttctatgtgaaagccgaccttgagtccttgacagttgagaaatgttggttttaaatttaaacagcaacgtcctaattatacatcagttacaactagggcatcgaagtttgatcttgaaaagatctctttttttctagttctggagttagtttcatgtaaaaataggatcgaattaaagttttcatgtgactgtaattctgaatttcgagcttttcctataacatgcaaacttgatcaacattttggtcttgcggccagttctgtgtgaagttctacgaaaatttcagtctaagaagttctcaaacttcactgctatattcataggcaagcaaaagatgtcgtgaagtctatcaagaaacgaattgcacacaggaatgcgaaggtccagcttcttgctctcacggtgagtataatttgaaatgtttattttttgtgtattgaatctttttttggaactatttttgtgtattgatctaatacatcaactgttagttatgtaccctgtacacattttatttagcaatgcttgcgtatgggtactgcatgtaattgagtaatttacaacctgctaactgtgtgaggctgtgtgcctgtgtgtattctaacttgtaactgtcagctcctgcccgaagagatttccatgtaagaatgtattatgagatactggtaggaatattcttaggtggatgccggagacttctttcagtgaccgcaagattccaaaatcaggagtgaatgatgagaaaatagttcgcattggttgataagtagagaaatgcagcaattgtgctctgatgtagtgaggcatcaggaaaaggcctggttaggatttgttttttgtcttgtaatttcttgagacttctgatgcatgcaatgacttcttattgtcatgtcatactttttggtattcaagattaaacaggaaagacaaaacagaaattctctagtgttctgaatttgaaatgtcctgttcctcaccatgcttgaaaagttgaaacggaaagccacatctaagtaatcctttactgaactgcaacctttctctgcttgattcagttactggagacgatgatcaaaaactgtggggacattgtccatatgcaagttgctgagaaagacatacttcatgaaatggtgaaaatagtcaagaaaagggtatgtatataagtttaaaccttaaaagttaaaattgtctggttagttgtaaactctttaaattttaacgccttattcttttgagcttttagcctgattttcatgtgaaagagaagatcctcactctgatagacacttggcaagaagtttttggcggggtacgtgcaagatatccacaatactacgcagcatatcaggagctcttggtattgttccacttatatcaaatatactgatattctaattatctttgattcttctttcatgctattttttctccccaaagggtataactccaataaggtaataagagaattattttcatttttttaagataacagcatcgtaacacaattgttaagcatgagagtgtggtcatgctatttccaaataatattatagctagtttaatatcaaaccatcgtgaactaattcagtgacattcctggaaaccttgttcacatggcagcgtgctggggccgtatttcctcaaagatcaaatggttctgttccaatatttactcctccacagactcaacctctgcaaaactatcctgcatctttacgcagtgctcagcaagagccacctggatcatcagtgccagatttgccttcattgaggtattgcagtttttgaaattttcttattacaatggatgtgtatactactgaactttagcatttcaaaaaagaattgaaacatatgtttccatacaaatttggtaatgatcatttttatttcaccagcctagcagaaattcagaatgcacgaggcatcatggatgttctttccgagatgttgaatgctttggatcctagtaacagagaggtatttatattgtatccggagttatttaaatccttgtaaaattactgatttatatcaaaatatgttattaggattctccctatgtttcttgaactgacattggatatgcaggggcttaggcaagaggtcattgttgacctggtggatcaatgccgttcatacaagcagagagtggtagagctagtaaacactacctcgtaagttttttggatctctcttaccattatttttaaaatatcagatttagctgatggtggtaacttttatcatatttaagactgataaatcgtgtgatgctggaggggttcttatttcttatacggaattttgacaggaatgaggagttgctcagccagggcctttctttgaatgatgatttgcagagagttctagcaaaacatgatgctattgctgcaggcgttgcagttaggttggagaaaacaaaatctctccaaaccaaaattgatagttctccacccgcaaatcctgggacttcaaaagcaccagttcaaaggttttacagattttgacaatcatttctttatacaaatcattccaacatattctactagaaatatgatatgaattcttgaaggttccaataaaatgtgggattattttgatgatatatttctgagtagttctaccaacagtaaaccacctgggattaaaattttctttccatgatagaagttcatgttatcctgacatttttttgtcttccattatattcagttcttcagggactgcaagtgccagcaaccaatctaccttagcacttcctgctccagcatcatccagtagtccaaaagctcctgcagcaccagtaccggttatcgaccttcttagtggagatgattacatcaaacctgaacctgcaaactcccttgcacttgttcctgtcacagaatattcagcagctgatcagaatgtgctagctcttgcagacatgtttgagcaaaataatgccaacagaagcaacaataaccttactaactcttttaatacatcggcaccaaattcaaatttccctgcatcacaagcatatcctgctccagtgcaacctgctctgcctcagcatcctgttgcttattcaaatggggtttcatccaatgccatcgtaccttactatggtaatacattactctcccaggcctgctgatatgatatcttgtgtgtatgtaattgatttgtttttcttgtgggggtgcacgcgagcgcgagatggggaggggatatgatttaaaatgcattggtaatatattttattcttttagataaaagcataagacaacacaaatctttcacattaaacaagaataaatggttattatttcctgtgaaacttatgaatatcctgttacatgttactgtcttcctatgggctagattgcttgcagtccttattgtgcagttgtagtaccaactctccctatgggctagattgcttgcagtccttattgtgcagttgtagtaccaactgcacctgatctcaatttgttatcatgtggtgctagtgcaactgcttaagttgcagttacactagcaactgcaccggatcccaatcccaatccgggcatttcacaatctcttgttgactggtgcagatgatcaaaatggaggccttccaccaccaccatgggagattcagcaatccatggacaacccaccccaacccacccaacttggccagatgccactgcaaccagggcaaccagtagggatgcacccccaatcaccacattctggtcagtttggccaaggatcattcatgtcaccacaacaaatggcaaatggtcagctaggaggaacacagccgcgacaatcaccacaaccgcagtccgcaccgaatctccaatacggagggatgatgatgtaccccaattcgatgcaagtcaatcagggagctggaatgtactcccaaccgatgtttgggggacagttctatggcatgagccatcatcatcagatgtatgctgttcagatggctggctatggatttggccagcaacctggagcttactacatcccgaatgcggcgtatgcttatgttagcgcgaatgagcttacccagaggatgaatgcggtttcggttcaggaaggtaattcacatggtggagcaatggcatccaggcctgaagattcactctttggtgatcttgtcagcattgccaagatgaaacagaacaaacctgcagctggcaaggttggtggcttgtaaggatgagtgattgagtgactagattcatattttctggtcatttgcagctgcaaaaacttttcctggcagtacataattttttctagttttgcagaaagataatacataatccttatccttattgccactttttgtgcgacgcaagaaggcatactaccctattgatgtaatttcagtttaggcaggattgtagggatataaattggaaagtaggttgagccttgagatgcttctggtgcctcatggcaaggttgtttatgtataaattctgaagtcatgtcataatcatagcagtttcatcaataatatccttatgtataaatgtctgataacaggtttacagcaaccttaaagcgttcttatttacccccgtcatttttttatcctcattttctgccatgtctgtggtgcatatatcaatatttgcatattaagcacgaatccaggactagattatcttgtacttttctggtgttctcctgagagatgcacggcaaggtgggtttttttttttccaactcaggtcaggttacaccattctgcacttgtgcgatgaaccagaaaatgctgagcctcactccagtgctttctactcatagtagaaaacgatctgaaccattgatctaatttgattgaatggttcagatatatttctactaccatctcatcttatggtagtagaagcgtgggtgggcaaatttgttaaaaaaaaactatgtgcggagggtaaactcgtcttctaatagttactaaacctaacagcgtacatgatcacgacaccgccgctcgcgtgcgcgcgctcctctctacgtgcagccggacgccgctgccgcatgtgtctctccccatcagaggctacgcagcagggcctagcatctcagtgaagcaggatacttttgccataggccgtgaaggccccacggtgcacacatgaaaaacctgagttggatggatcattgttgcaaacgtcttcgatcgaatcaaatgcatgtctattaaatttaactactactaatatatgagtgttcgattggaatggtcaaaggtagatctactgaatatctgaatctgacgatgaatggctcgggccgtgcctttcactctccgggggtgtttgtgttgatggagatggcactgctggctagatgggttagcagcttgcgtacactgctctctgttgcctttacaggatttttttgtgctcaagctgtttctgggacaactaaattctttatgtaactttcttgacacaccattaatcaaatggtaataaggtagagtctcgcgtcaaaaaaaaatcatcaacaaagcgcaatcaagagttatatgaaacaaaattcaaacatggatgatttatatttctatcatattgtttcatttatggcacaaatagatccacgtaacatttgaaaagcagcaggcattaacctttaaacacgcagaactgcaacgaaaatggcacaataccaagagcttaactgctactctgcaatggtgtctcgctgcggcacacactagttacatacatcatcaccaacagcagaattcatgaaacatcaagcactacaatttttcgtcaccaactgcacaagtaagcaccagcagtgccaggatttttcgtcaccaacagtataattcagtagcagcaacagcagtattttccagaagcaaactctagccggaatggatccaagcgagtctccgccgcacgcggaggggccgggatcatcgtcggagtggcctccgaattgaactgcgcaccgctgccccgattggatgcacgcggaacggcggaaggccacgcgcagccgacgctggaatggatcggttccatcgccgcgataagtaacatgcgagatgcagtgcctgcgtcgggcccctgatgcgatcaagcgaccgagacacagaaatcagccccagccaaaattacccctaatctgtattagaagattactaatctaccctttaaaataaacggtcaggattaattctactcgtagtataatactacgagtagaaagcaccggagcgtcgccctttctgtgggggcaaaaagaagaatctagcttatcagattttttttattttgcattttttttatttcgggagagaaatttctccttttccaagaaaaaaaatttagtacttggatagacggagtagatggaaacagatagaaaattcatcgcagcagcaacacatgctggatttttcacattttaatccttttgaaaagcttatcctacaaataaacccctaaaaaacttaataaatgatccttttcacggcgccaatatcgttggcgtcgtggtccaacatgacggcgccaatgacgttggcgccatcccctctacccctgggtgaaagttaggtcacaaatgtgaagggggacggcgccaacgacattggcgctgaggactaatttgtaattttttttaaaaaggacctatttgtaataaaataaggacccatttgtaaaaaaaattataaataggtcctcaacacaagggtcattgccactaaggacctatttgtaaatattttttatttgctaattggtcatcgtcccctttcacatttgtaacttaactttcatcggggggctagggggacggcgccaacgtcattggcactttcaccggggggctaggaggatagcgccaacgtcattggcgccatcatgttggaccacggcgccaagacattggtgctgtgaaaaagatcatttctagaataagtttttttaggggtctatttgtataataagttttctaaaagaatcaaaatgtgaaaaatccagcaacacatgctatgctgtaacatgaaggcacgccctttcggcaacattgctcgtaattgccacgacggacaaaatcattcgtcatgcaatctacattatacattatactagtgttatgttgtcaccgttgtatctggtatttcggtttaagatggaaaccaagtcatgggactaaaaatgaacttatttccttagattttcggcccacctgacggccacggcttaaatcgcccccacatctttcccgtcaagaaccagaggaagaacaaggccgccggcgtcgtcggcggcggcggaggcgcggcgacacttcaccaacctcgtcgcgcggcctccaccaccggctgcaggctccgccgtgcgggacggggttgcggcggcggcggaggcgttcactcaggaaggagtcagatagcggcaaaaattcttccccctatttcttattcctcctggaatttctcgattctgattggcatcaattgctgctgctttacttagttttaaacttcaaactcaaattacaacttcctcgtcagcacgctttctgttttgcatataaataaataaataaataaaataaaaaataaatcagtctatttttaaatttataatggttaatacataattaatcgtgcgctaattaactgtttcattttacgttctgctaatatgctatccaatatggagtttaaaataggccctcagacagatgaaatggagatggtgaatttgtgacaaaatgggttcagaccttaggcggccatgcacaacacagtgactagtggtgtggtgtggaaagggctgaaatgtaataaacatatggcagtggcatcttttttcttgaggccactccatttaggggcttctgttattgcccatgctcttatatagaacaacataaacccttccctttttcaagttcgttgcttttttaacaatttcatgaaggaattgtttgtaggtgctaatttaaatgatcctaacacaagtgagaacaacccagagccgccaatgcctctggaggttttcaaaacccggtgttcaatgttcacttgttcagggtagagtgtaaaaaaggtacaagttcagagttctaacttcatgcacataacagtacacacaatgccttattgaatgattaaattggatataacgcaaaggaccggaagaccaaatgcatatttgtatagccatatatagtagctgaatgttgagcagtcaggcctatttttctgcacgtgttattcacctattctggctactgaacacctgaaacaggccagtttaacagaagaaggaactccaagcatgaaagaattgttggtatgtaacggcaccttgacaaggtacggtcagttcttgatcctgtagaagagcctcttgttagttaggccaaagaaaaacataggcgggtgaacaaacaatgccttgttagaacatgtttcaagaaacaagtagtccgctaaatggattcaagaatttaggactaactcccaacacacgacatgacatgacagagctgtaatgttcatataactctatacatcatatgtggccagctgaacaataaggttaagcagaataagcagtgaaaaagatgaagaggatggagaattaagactctgacctgagcagaaaagaatggtcaactttgtccctacagtaatgtcaaaccatgttgtagtgatttattcacattgtgtttctagatcaacttgagcttcattgtaatctggctctcagttgcgccgcgtgacacataaccaggtccggtccttctctagtgaaccttcctcagagacaacagggatatgccactgaccattctcagattcctgagtttcacagagaacagatggaataattatgaagtctgtccagataacaaaaatttaaaaggctacaattacatgcaactgattgaaggctttaatagcaatgaagatcgtttttgtgcataaataggggctagttcaggcaattcttgacaactgaaggtcaaatctgaactagagatattacggccagttcacttaatttttcagtcaaatactatggtatgtctacacaatacgaaaatataatatttcttcagtagttaaattcaaacctgaattacaactgagcaaggaggaggcatttgaagtgtaacacaactgtcctcaaaattgaagcgtacctgttagtgaagatgacaccataaaatgagctctgttgcgagtacacaatgatctatagatatattgaaagtgttcatacagatgtatatttgcagagtgaatcttaaataaaataagataagtatatttctctcgaggtttcagggtaaaactatgtagcacgtcaacccttgataacttcttggcattatcatattttctaaatttacttaaaaggtataaacaaatatcaccaaaacagatccacacctgatgcctttccttccatttggggaagaaatctctttccaagagctgaaatgtgtggtctctcatttcatcattggtaaccatcaagcatttgcatctgatagcagcatacaaccagtacctgaactatatgccaaaatattacatattgtacatatacagatgaagattttcaaaacttcagctgtggaaggcaaataactaaaacaactccttctaaggagcaactaatgcaatggtttatcagagacaagttgtacatcaatattcaaaacattgagaaaatggaaaattcagatatatcataaatagtagacacattaaataaggagaactaattttcaatcttcaggggggacagttgctgtacagcttcctatagcatctaaaaagtagaaaagcttaccaatcatcatttgagccagtaggggttgcataaatagcattagaaagcttccacttttccaccaacttacgattagaaggcttttgcatgcgctctccagtgagatgtcggttatgcacaactatcaaagggagctttcttgattgaaatctttgccgtataacatcagcaacaatattaatctgtccagttaaaaaaagatagaggcctagtattttagatatatgttatacaagaagaagaaaatatttatcacaatatacatgccttactcaaggaaatatgcttatggctaaaaaggccaacgttggcaccatccacaactgcatcaaaagggccatgcttttccaaccatttctgaatatagaaaaatacagcgaaaaagtcaagctaaatggttaattaagagaaaggatatggactacacacaccactggaaagctctattgatcatgattcacacgctgtaagaactatttatgatttaaagatgataattctttttccaacaaagaggctgcaagttggctaaaaattaattgcaataaagagaaactaagatattgtggcatatgaaattttctagtttgcacactgcttaataaaataatgcacagtattcattaaatatacaaaatgagatggagaattgttatatttatatttagtttacaattggatataattctgagcatacataatttactcaatattgaaaacccatctaattttgtatcctttcatgctgtaaaccttggcttcaatctacacttacggaaatatttagtgtaatttaatcaaggcataatattgatgacatgtattggtaaatgcacagcctagtaaaaatagcatttacggtgttcagagatagatgacctgaaagttatcaaagtttgatctcctctctcttttgatagctaattttgccaccaatgtggcaaaatcttctgtttcttttggatcaagatctataatagtcaatttttctccacaagcaaggcatgcaccattcctgtcgatgtgcgagtgtgatatggtccatttcccccttcctaaccatcctaacccatgccaacccccaccattgttctcaatagcttttgttatagcacctgaatcccattttctcttccccactttagatgctgttgggctctgaaaccaatcctcaagtagtttagctgtggttgaagatgcttgtctgacagtagtcctgaacttatgcaacaaataataaaccttgtctccttgttgtgcggccacactagccttgagaagtgtctccaactcaggctcttcaggtctgacaccagactccaacatatgtgcttccacctcaaatgctttctcaacattgccgctattgcagaatgccgtcaaagcaggaccatatgaccgcaactttggcgcaataccttgatccttcatttgcttcacaacatcaaaggccatgtcaccgttgcccatggacatcgccatacgagccactgcagtcagagcagactcattcatgggaactttctcttcctccgagcgcatcttctcaaatatctcaaaccctcgagttcttgcatactccctcagctcatcactcactggaattcgactcggtttctccgtcccatcatccgaagcaaacaaatcggtcttgtttccctcctgatcttcagagtggccttcagattgtacatcgtctccctccaaatttcccacgctttgagtagacgatgaatgtaactgcccaatactagcaatcccactaccggcattgccacttttcgccggttgcacaaacccaagcgccgcagaagaacacaggtaaaggagcacgctgtagtgatgctgccccattttgatcccttccttcaccgcagaatcatacaggttgatggctccaatcacgtctcccctcttcgagcacatgtccagctcgactctcagcttgacttcgttctcaccacccttggctttcttcttccccttcctgctggcattgccaccactaccgttactctggcatctccccgaatttccagcctttccagattcccgcgcttgcgtttcgcctctcgtccagcgcctgccctccctgcgttgtttgagatccccacccctcctcgttccctgaacctccccgtcgtcggcggcatgttgtcctccgcgcgcgggcctgtcctcccctctcctccacggcctcgcgccgccgccatgacggccccgcccatgccgccccgccgtgccggcctcccgtgtggccacgccgacctgcgccgtcgcgcctttagcgccagctccctcggcggctctcgggccggcgacgcggtctccctggggcattacgtcgagcacctggcgcgcgtggcacgagagcggcgggaggaggagtcgcctgagggaagcagcgggggatgatgaggtggtggctgggaggaggaagaggagatgaggaggaggaacgaagaggggcgccatggccatggcgcgctgccatcgcagcgggagagcagcgggtgaggttttaacgaaggtcaggagcgaacaggataaggttctgtgatgcatgagcggccgggtttaccgtctaatcctatttatttctcagctttatttctaagttttaaaatttaaattctatcacatgaactaatatacacgcgtgccagttaattcacggatttgctaaatgacattcggcggataatttaggaacaaaatctttacagattctaaaccgtgattcgtgtttgtgctccttctctaactttggtgacctccaccctttctccagtgccgacgaacaaaagaggacatagattagtgtttgtgtttgggtttgggaagcacgaaaagaagggttttcctaagggtctagaggggtgtgacatccttacccaattagaatttgacatgtgcggcctatgagagatgtgtgctcatatttaatactccctccaatttcaaattataacttgttttgactttggtcaaaattaagctacttcaaatttgattaagcttgtagacaaatatagtaatatttacaacatcaaattagtttcattaaatctgtaattgaatatatttttataatatatttatcttgggattaaaaatattattattattttctacaaatttgattaaatttgaaaaagtttgattttaattaaagtcaaaactacttatagtctgaaacgcagggagtaccaccttactagtttaacaagggtagaaccaacttataagatcttgtccctccaactatgtcgtatactttggtggcaagggcaaatcagagtgactaatttagaagcaacaaactagaggtagcggatccgagggctcctcgccgtcagacagagaagacgatggggcagggcacctcgacatcgatgtcttgaggggagaggggagggggggaggctgactagaaggagatggaacaaatctcaaagtaaatctaatgatctagtatttgtacaatgtcgggtggattttccatcataagttgtgtagaccgcccttgatagttctagttcattctcacctaccgctacagcatacctatttgctcaaattattttttttacttcatacaaattatcatccagcgtaggaaaaacttcagagaccatacttttgaactaataagaaattctacgtgactttcatgggaaacagttttttcccttcaaaattcacgtaaaattgcaacattacaaacgaggccccaaagacgccgaatgaaccttccaaagtaagtaatctgtttcccttgaagcctaccgcaattcatggtagcaaatgctgcaaaaggacaagtcaagctcctgtaagattcgtatgttccagacgagttcttaatgttaattgggagtatgtataaggctgtgtttagatctaaacttctaactttttttcatcacatcaacatatcatacacacacaacttttcagttatatcgtaccaatttcaacataaacttttaactttaaaaggaactaaacacagcctaagttgatacttaataggaggggtgagtctagctcgcaagcattcgcctgtcacgaatgtctccgatccgacggatcccgtcacctaattagcgtgtaattaacactcatcagttagtaccgtgaaattagcatacgtaggtgttattaagaaatttcagctccatatgcatacaaaagtagaaagcccagcataattagcgtggtaatttttttcagtatttaatagcaacacattatattcaataatttatatcctaaattttaaacatgccattcagattaaagcctattcaaaagtttttaaaataatctctgcttataaactttgtacaaaaataattctttatattcataaactttacatggcaaaaaaattctattaggaaactttcttcggtaattaaaaaaaatcaactcatgggattaaaaaaataaaaaatgtaagattaaaaaaaatccattcacaaactttctacggaaaatgtttatattcataaactttatacatgaaaaatattctattaggaaactttctacaacaattaaatatttgttaatataggactttaaaaattatacacaaaatgcaccattttattatatgataaaatcactcaataagtagaaattataattatgactacatgcgcatgcaaaattattttatatacttaaacatgcatgtttttccagcttgaaagaaaggaacatgtatacatcatactttttcagatcagatagacttgcatgcactcttctagaatgagcccagcccacgtgtccattcgtgcaaactccttcccgcgaacgttcgcgcaacagccatctcatgtgatacagggcatgtttggggagctcgatattataagaagcagctaatgataatctaaaaaagctagatttccagaggaaaagattttagaagaagttgcagtcaatagaagctccccaaaaagggctacattttcttgttactcaatttggtcatctactatattgttttgaacaaccaaaatcttcaaaatataattcaccaccaatgaacatacactatatagttgaaaatttgaaacccacatattatcgttgtaaaaatctcaactcaagtagttgtaaacttgtcatattgctattttctagacatgtacaccattccctctagggaaatagaacaactgctagacaagattatacacttagctcgcatgcaaatatagagcagaacaagccagaagactaaagaaaataaaattgatagtttcaggaaactcaagttcacagaacaaaaccatgaatccatcagtctcatgatcagaatccattaccaacccaaacagtaagatgacagatcacaagaatcggatgccccattaatcgcctcaataattgttgccgctgaaaaagaaataatgatactgaactgccgccatatgatcgattgagaacattgcaccagaaactgcacctcaggaagtagagccaatagatggagaaatatgttcacttggtaacaaatgtatccaaaattccaaatcagccaagtcaaataagcattcttatcacagaaaaatagctagtatagcagaaaacaaccaaacttttacccaccaaaccattcttaccacagaaaaataagttctcgtaagctcattcatagttctgatagcgaaatgaacattatgaaaattcaaagcattcacaatttgtttaggcagttacaacggaaaaggtaagctttgctctcataaaggcatggagttccctgcaaaagaagaggagggagtgtcacacattattgtttgtgcaaacctgcaagggaaagcaaatgctgtccaaaagcaaacagaccgattttgttgacctgacctgggataacataacaaccagtatacactcataactatcaataaacataggacatccaaatatgtgagcaatgaaactagtttttacatctatgtcttgtgatttatcagaagtgctttatcttcttatgaatggttaggaaagcaccctgcttgcagcattaacaccagtgttgcaacaaagtgacttcctctaaaaaatcagttggatgcatgagccacatactggacggcatcaacttccatgatgtgtaaagccccacgtgcaccaaatcaccaatcagtaaagctattatactgtgcttatatactcggcaatcaatggatctataacttgcaacttaatatccatctacgatactatgaatcctttggggttaagcaaaaccctcaagtcattgccatttaggaatttggactagtcaacccaagcttagtgtataaaacatactacctacatcccaaaaatatcaaaaatactttatttctggctatgcagctggacaagttaggatggaggtagtacatataagttgggatggaggtagtacatatgaaaagcataaaaagtcaatatgcccataaagctccctattgtgtatggatgcaaaacaatatcgagtacaaataaccttggtcacaaacagatgagcaaccatagaagttcccctagcagcaacctgataacaccacaatgtgcttcgggtctagtgaccaatctcaatagactttctttcaaaccacaagctcatatcatttccgagtactaaaaacacaatgcaattataagatgtacaagctgcctcccatgagaataaagagaccgagatttccaacaaatcgcaacaaaactgatgcctattttggtcaattttttataacaaaaaaaatcgtcatttacgttcatctaacatcatcaattacaataaactaaactggaaagttacaaaccataaccgattccgttcctggatgaagtaaacatggtgaaatcaggggcccaaagtacactaatgcacttagaacgtgcagtgaccaagaacctcaccttgggggactaaaccccagctctgtgactcgggcgcgatcgcggaccgtaaccgcgccgacgcgacggcgctgtggagcggcagcgtggagaggaggcccccggacaccaaaggcaacctgcgaaacccacccgaggcgcagcaggtaacactaacagcgtgaggaaaaaagggggattggttcagagcgcggcgagggttggcgcgcgtgcggtacctgttgatgcaggtggcgcggcgggaggtggggaggaggccgcgggcgaggagggaggaggaggcggcgcgggctatggccctagatcgggcggcgacggctgagaccgccattttttttctcaccaaggttggacgagggttacaaggtggggaagggtttggctgttcgggggtttgggggtttagccgtccaccctttgcctccgtttccaaattatacttacaaattatttttccaaattatactaccatttcccttaaattaattgatcgtttaaaattttaaattttctgctatcacttcatcctaaaatataagatttttttttattttagcaggatctttgagatgttattttaacgaataatatttataaaaataaattgctataaatacaaagagctattatgaatttatgatactatctccgtactaaaatataataatttagaattggataatatatgctagtgttacgaatcttgacattcctgtctagattttaaatattatattttgggacaggtagagtagtttgttaaataataaatctaatgaaattgtgatattattcttattgttattgatatattttattttttttcatttttagcaattaaagttaaaaatgtttagctttaaatattttggatggatggaacagtagcttttaaaagatttgtgcaaagtttttaagacagaaatattttgtagcatcgggatttttttttcataaagtaaatatgacatcaaaatttataattatattaaaattacatatacagtttggtcccagtgtaaatagcactgcttgtcgaagataggtaagtggtggccgccgaggacaactgcattgtgggctcaagccgtcccacggtgagaacggccaggatgatttaaggttagaaaattagtgcgttatggacacactagaaaattattggtgagagtttcccgtacataacatgttagtattatgatttttttagtaccacaatacaaacgtagacgctcataacacgtgcacgcttatcgctatgaatacacatactagaagaataattaaggggtatttagatctaagggtgtaaagttttagtgtgtcacattagattatatagggtgtcgcatgggggtattcaggtattaataaaaaactaattacaaaatccgtcagtaaatagtgagatgaatttattaagcatagttaatccgtcattagcaaatgtttattgtagcaccacattgttaaatcatggagcaattaggcttaaaaaattcgcctcgcaaattagtcgccatctgtgcaattagttattttttagcctatatttaatactttcatacaggtgttctaacgtttgatgtgacagggtgaaaaatattgggtagccatgagtttaatttaggatattaatttaggttggttggttccatcctaaaaaacctaatactacctccgtcccaaaataagcgcagccatgagttccgtgtcgaactttgaccgttcgtcttatttgaattatttttgaaaaatctaaaaaacataagtcacacatcaagtactattcatgttttataatataataacaataaaaatactactccctcggtactctatttgttgatgttttggacatgatttcagatacaaataagtgattaattaaggtatttattttttgttttacccatattaattacaatgcatcaacatctattaatgcggtttgtaagcatgcgtaggggtatactagtctaaagtgagcgtggggaggccaaaacgtcaagcttttgaagcgaaacaacccagctccaaaacataacaaattcaagaccggagggagtaatcataaaaaaaaattcaaataagacggacggtcaaatttatacacggaaactcaaggctgcacttattttggagagggagtatttggctagttttgatgcgtgctcattctcgaaccaacgcagccggtcgtcaacatccttccgcatgctccggcgggcgggcgagtaggctgtgcttgtgcggcagtagcttccgggagatgagtgccgttctcgcccccgaagacctatatagctggagcctggagatgagtcccagagcttcgtcgccttattagatccactcgcccccaacctccaaacaggccgcccggatctagccgtttctattcttcttcattttcttctttcgatctacttatactatttttctcattgtgattcattaaggtggtgtttggatccatcgaatatttggacgctaatttagagtattataaattaattataaaactaactgtataaactaattcgcaagacaaattttttaaacctaattaattcataattagcacatgtttattgtagcattacagtggctaattatggattaattaggcacattagattctcgtgaattagtccagagttatggaatgggtttttatcattagtctatatttaatacttctaattagtatccaaacatccgatgtgacatggacttaaaattttagtctccgatccaaacagcccctaaggagttcggaactctctgcatttcccttttttttcctggcgtgactttttaccctcacgtttacatgttgggagtagggatgcaagcgggccgaccagcaagttcactcataggtcaaataaatgataattcatgggttttcgcgtcgtggtctggtttgctgtatctagatatgtaagtgggtcgatccataaatctatttatagatcaaattaataggtaacccgctggtcaaacctatgggttatgtactaattttgcctataagcgggttcgcggacaaacccacctgcacccctagttgggaggacttatctatgtagtactacctccgtctcaaaatacttgtctctttgagtttttgtctataacttttgatcattcgtcttattaaaaaaaatatggaattattatttattttgtttgtgatttactttattatcaaaagtaagtatgacttatccttttatatttgcaaaaatttttaaaataaaacgaatggtcaaatgtttaaaaaaaggtcaaagcgactactaatttggaacggacgtagtagtattaagggtatatatgagaaggagaaaaaaaatattgaggttgtcagttggaaaacagattagtataattttttaatcaatttttttatagactttttttaataaaaacacaccgtttaaccgtttcgtgtatatgaaaaacgaggaatattttctagaacgcagccaatcgtttatggaacaatatggatttttatgttatttattatataattgtttttttctcgttcccagtatatctgaaaaacctcatcccgtttcaccattttgtttcaccattacagtaggattgaatattgaattctctctagttccgccacgtgtccgccagaggagaggggtcccacagatcggtgaaggactgcataatttttccccttcttcttcttccccgcgagacgcacggcacgcctcctccttcgccgccgcctacgacgaggctttcctcctctctcccatcgccttcctcctctcctccctttcctcccaggcggcggcggcgccctcagcagcaggatccaccctcgcgccaccccaggccggccgatccgatccccaacgcgatcttgtggggggcgaggcgcggaaaggtggccgccgaatcgtcgcgtggttggttggttcctaggtgagtgagggggtcaagggttattagagatttcatgatttcatcccgtgggcatgtcatcctgcctgttggagagtttgataaagacgtggtttcgatacttagttggggggggggggaataatttgtgattttagtttggagaatagggtttaatctgccgcagcggttctttgtttttgggaggtaacctgtacaaagatcatgctaatccccttcatgatcatttttttttggttattgggaaattttcctgaaccgtgctccctgtagaaccctgcaaaaacaggatcgtgttgacggcagtggttagcattgttaaaaattggggatcatggttactgttatagatttttttttgttttttacttatgggggtaacactatctgttggataaaatccatcatcttgatgattgttagctgcccaattgtttaaaactaatgggtgtcgggacgattgaggtgttgagcatatggggtgggatctcgactacacttttaaaagcactatggtgatatcggagttgtatgacaagtatcatacttttcaaacctgtgttgtgacttaatccctccgttccatattataagactttccagcattacccacgttcatatagatgttaatgatgtgtctagattcattaacatctatatgaatgtgggtaatgctagaaagtcttataatatgaaacggaggaagtattatttttatatgcatgataacattatccctgagcatactgtgttgtttctcaagcagtcaaatcaggtttgagatgccatgtatttatgcactctgtagtaaatagttatttcattttgcaatcatttggcatggcatttcatttcttttcatatgtgacaatgttatgttgcttgattgtagatcttaaaagtgtcctccatgtcaacacttgtcacgtgctcactgccaggggctgtaaccactcatgcatcaaccaggagatttggaggtaaataattggctttaacatttatatttgtttgctttatagagtaattcatgaattgctgtcctcaacattgtttcatgatttcacaatgtttgtctctcccttactcgttgttaagtgtctttggccctcttctctttgcatcgtgacagttaaaaaaattccacggattgagaatatgtaatacctcattacttcttaaattcatctgtgtttgttgacttgctctcaattttgatgtcctaatagtgcactaagaaaatgtaggtatgtaagcatccatttggactatgcaatatagtatacaaatatgacaagtagcccgaaacctgtctgcctgatccttttgctccttttttttagagcacccttgagtttatgttaagagggttctttagggaaattggtaaactgtttcattttccaaatcataagttcacataacacgtggtttgggaattatgggtcgaaatcacatcattagggcctgtttggcacagctctagctccagctccacccctcctggagctggagctcagccaaacagtttcagctccactaatactgggagtggagttgggtggagctctctcacaaaatgtactagagttgtggagctgggtttaggcagctccacaactccactctagactcaactcctggagtaatatttaggagttggagctgtaccaaacaggcccttagtctcctgatcaggcaccttgtgatcttgttgatcctcttttgccaaacaatgtttcattatgtactaatttttcattataccttctctgggcaggttcacaatttcagacatctcaagctagctgcatctcatttaaaagggaagtgtctgctaaagcagtattaagagtaagttggaatatatcatagattcatatctacctcaatcttcctataaacaaaattaagtgttcaattcctgcaaacaaatttactattttctgtttggttagcttattgtgagttcatgacaataaggcatttgatcaataaccaaattggcatgtatcaccctctttttattatatatgattatatatagattctatagaaaaattgaattaggagttactgttactccctccgacccaaaatatgacaacttaggaccagattggacacccctgtccaaattcgtagtactaggatatgtccaattctgtcctagttgctatattttgggactgaggagtatgaactatgaaatattcatgttaaaatggtttagttcaaaatacagtagataaggattttaccatacttgattggtttattggttatacccttcctagctagtactaatcgtagtgctcaataggtgcatatctcatgggccatggcatgtgcatgctgcatacatttaaagataaggtgctttgaattgttaattagtagataaaactgcatcagtaccactacaattttgatggtatcaacaaaacatttcagtatttcacctctaatatataccagcaagttggtctaaaaattcgaaatacctcttctgttacatttgaaggcaacggtgttagataagggtgatttattgattttgtccttacgtgaatattaaattgttgcactaccaaatctcacatctctccagcagccagtagtagtggccggcggcatcattagtgtcgctggaggtgggcaacaagttaatggagcaaagagacgtgggcggtcaaggcatcagagcgtctgcagcctggccgagacccccacctctgagcggcctcaccatgagggtcagtgtgagcagtgtggctgggctgagagcattggctgtggatgcatacaaccaggctgaggactgcactgccaggtggcctcagatgttgacacaggtcctaggtggagcctaatgagatcaagatcataagaacatgcttttcctggtttcttgcttccctcttagcacggtagattgagcagccaagccaagtagtgtcacctccatgatgaagacagcaagcagtgggtattgcagtcattctgcgtggtaaaaaaaaggggtcaaaaccgaaataggaacaaagcatgacaggggatgtaatgttctgatgttatttattgggatcactgaaactctggtggtatagatgcagttttttcttaatagtagtactaaaagaagcaatattatccctggtacatggtcaatctcaatgattaatatatgttctgaattattcatgatgctttacctccagttactgaacttcaaaactgatgaaagggaaaatgctagcttgcttatctgcatacttcactgtcagatcttctcattgactgcttttttgtgcgaacgctattgacaacagagcgtaagatgcaatgccactcagacccaaagtgctcagcggaaatcttcaactgcaaccgtcaaacgatctgaccccaaaggtagatctgcctctaattgaattttattctataggtggcaggaacgcaatcgcttaatttcactttctgtcctgtgactttcaggaaaaactcaggggccaaaattggatgatgggagcggtggttttcctccattccgtttcggcaaaggtggtggtggcggcggaggtggtggaggtggcagcaactacttcggtggattccttctcttcacttgtgtgttgctcctagattacctgaaggagtttgagaaaaacctgattgctcgaaggcaacgcgctggatatgatgcaaacaatgatatgttccaacaataattgtttaacttgttagcactaccctatctgttgatctgtaaaactctacaagaattcctgccgtgcatgtttatttcgttcacattacccgtagtaaatcatggcttgacctcaccgagaggaagctcagatgcactggacacagctactggaaatgtgagttcagtgctgtggtacatccaaatggaccgtattattgcaggtgttgaaattggaatgctttttggaatgttgaatcgcaaattgacccttttggacggctgttttcccttggtaaagttaaaataactcaaatgttggaaatatgctagtcagtggacggatttcacactgaatttctcagatggagtctgaaaacttttggaatctgaaagccctcaacatgactgcctggaccatggcgtgcgccatgtgatgatctgaaagcacacatgtgggcggagtgcgtggtttcgccggggtttcatgacaacttctctggggttttatgacaacttcccatatgaattcctcagacttgacgaagactcgacttgcttgttggtctcgtctcgtccttttttgaaggaagttgctatgatgttcttttctaatcttcttttttttttttggacccagcatgtttgtcacaaaaacgtgcagtctttagattagaaaaaaaacagtctttattgtagatttgtagtcaagcacacaaattagggtgtgacgagaaattaacatcttgtcagaagttcctgttgtgttcaacatctgtgagtctgtcactcaggcagttcatggacaggtctgaaccccgaagtcgaaccattttccgccctatttagattccaccttaaaattttttatcctgtcacatcgaacgtttaatatttgcataaagtattaaatatagacaaaaaaaaactaattatacatattgcgactaatttgctagacgaatcttttaagcctaattgctcaatgatttgacaatatgttgctacagtaaatatttgctaatgacgaattaattaagcttaataaattcgtctcgcggattaccgacagattatgtaattagtttttttattagtgcccaaatacatccttttttgggtgtagaggccggtttaatccattataaaaaatacctcatacgataccctatataatattcgatgtgacacactaaaactttacgcctctcatctaaacaccccccttatgtagggtacggtaggagttggatcgcttaattggcttgtcgggttgagcatattgtattcctgactgattatatgactggaaagcgatttgtttgtgtatcttataggactagcctggctgtttttaattcggtaattgtagacatgattaacatacaattttgctatatatatagcgataaattttctcttaaaaatttgacatatataattacaatacaatcgtgatataattacactataacttatatgtaacttgtacgtaactttcacataattttgaaatattatatttgtttcaaaattttttgcaagtgaagaaagaaaaaagtcacaacgcgcacacatgtgagaggattcgttttcacggaaatagcgttttacggagagatttttaaaagttacgtacaatataattatatcatgattatactataattataattttttggaagaaaatttgtacaagtgatcccctcaaggttgctgtcagaaagacacgaaaaatgtcatcttcgtggattgagacttccgacggttcagcaacacaaccagtccacgtcacactcctaatcaaatatactcatccgacaaccaagatatttcatgttcatttatgtacctatgtcgataaaatcgcggccgtccgggggctccgatccgacggccagggctgcaccgctaccgccacgacgtatacgaggagacatatatagcggtgccccgtacgcaacaccaccgcgtggtacgtatttggctcggcctgcgtcgaacatgggccgtccgatccactttggacggcgggggataggtcgtagtagtagaagagatcgcattggaggaagcgtgcctgtgacggctcgttcgagtttccggacgaaacaaaacacgggagctctcgcttctcatctcatcttatcgtttttgttacttgcttttgcttgcgtggtagtctgactgtctgaccgcacatagtgtctctgtcccacgaaaaacgaatatagaataaatgttatatattctagtacaataaatctgaacagagatagatccaaattaatagtattatgatgtgtcgcatccaatacttactttgtttttttatagaacggaggaagtacctgctagtatttttttttctttttttaaaaaagaaattctctgtattttttccacaattccgttgaattattgccgtatggagcaaaagtcgtcttttccggaacagtactatgcatatattgtgttaaatcgaggagaaaaaaaatgggtactgtgatgctggagttaaaaagttttttctttgctgtacctggttaaatagtgagaattgaagggtggtgtctaattacgcgcgtcttgcgtcattgcatacgctaagcatatgaggagagttggcaatagggtcatttttttaatcttcctaaatgtttctccgatggttaaaggccattttggttggatagggagagtcacatgcattattcgggtgattagctaggtcggattggcttgattaaataccgtttttagctaacagtcttcacgatcaactaaataaacaaaatacgccttcatttccttatatattgctcgtttgagctaaccaacgtcatagaaaagattgaagggatcaagggagtacaacaaaacacttcatcaccccagttgatatcccgtgcttttactatgggatatgtagatgaacgaacgttataaattatagaaatgatagatacatatatttaaacaatgtggagataatgatttacattgtttgtatattgagttctaaaaataaaaaaaagttatattggcatgatattaacatattgatatttacataatttgtagtgagtgatgatatgacacatttacatggtgagatttagttaacatcaattttatagtaatataggataacaatatgttaaaatgatctacattattttctatgtttttttacattagggacttgtttcatcatgacacttcaacaaaaacattcgaataaaaaagatgacaaaatattataagatataagtacatattatacctgcataataaatgataaggctcggttttattggtacgatagttggtcactacccctaattattatgagtacaatattagtagtgaaaatcgtgataaacatcattgatgacgtgaataataataaaagattagggcttaaaatacataacacgtggtcctagtagttgctactgggtatttggactcttcctctcagagacatcaacttcttcccaatcagccgcttctactactactaactagcctatttcgtcttcctctttcagagcctcccggataaataccccaactcctgcctccccacgctccccctcccgactccgagagattacttcctccaccttccatccatctcctcttctccccctctccctctctctctcgagatcgaacgaacgaagaaccctaggtcatccatggcgggggcgatccgcgtcaccatggaggtgggcgccgacggcgtcgcggtcgtcaccatctgcaacccgcccgtcaatgcgctgcatcccatcagtaggcctcctcgtttcttaatttcgatttcttcttctttttttttttggtttactcgttttgtttctgattccgtgtgctccgattgggggtttttgctgctccctgcagtcatccagggattgaaggagaagtacgcggaggcgatggatcgcgacgacgtcaaggccatcgtgctcaccggtgaggcctcctgctaatcgtttcacccccacccaccttcctgcgaaaaatttatcagagaattaaccacctgtatacaacaactgaaatatctgatttttctggtgtggcggtcgtcgaatctctgctgatttttttactttactgatcgattgctgtgtgtacgggttgacgtaatacgagcggcgatttgttttgttgtcttgctcgtgattttgttagatgtgtatggtttaactggatcaagctatctttggtctgttgttctgagtggttgtggagtagtccctatcctatcatttgagctgatcttggtcaactgggttaatgagtgtgctgctccagctgtacaagatttgctttcctggtggtctggaactctagtggagctgctgaactgtaaatgatgaatgttggatgctaatccggtaacctcaccaaagtagaaactgcagcaatggcaagttatatataacccttggcaagttatagatcagaaggaacccacttagttctgtacaggtcccctaggagatatttttttcttcaaacggtctttgctattaaagggtagggaatggcttgtcctgaattcaagttgtacatgcccaccaaacttttggttgaaatgtgccgttgtgcattttaggaacgcaagagtaagaaaggggattgtaataaattttagtttgtgaaagttgctactttatttgtttgtcatacctgttgctttcctcctaaattatgttcaatccttactaggtgctggaggcaaattttgtggaggctttgatatcaatgtgttcacagaagttcacaagactggtaaatggtcctgtcatatgtacatgtgattaatgttttgctccgagcttgcttcttatagcatattgctcactttcattacaaacatgacattggcttgcaggaaatgtatctcttatgcctgatgtatctgttgagcttgtgtcgaatttgatggaaggttggccatctctacttcctatttttgtcatagtttctcactccctcttatatcaccaacatgagcgctggcatcctttgtgtatatgtgtttagttcttaccaagattattatgcctggatctgactatagagctatttatatgtgcagcgggcaaaaagccttcagttgctgccattcaaggccttgctcttggtggcggtttggagttgaccatggtatgtgaattgttatgcagaatatttatcagttgatccctaaccttgctcaagggtttaatctaaattatgtttattacataaatgacaaattcttcagggttgccatgctcggatatctacccctgaagctcaacttggactaccagagttgactctgggcataattcctggatttggaggtattagtgtttctttctatgtcagattgaactagtgctccactattctacatcccttgctttgtattagttcatatcatgatctgattaagtttgcttattatgaaggaacccagcgtctgccaaggcttgtaggtctgcccaaagcaatagaaatgatgctggtgagtctaatatatcatctgcctaagttaattaattggtcacactctcctagtagcattctttctatctaatacagtttttggtcaaaagctaaaaaatgttccaactagacaattggccatgtttttgcaaatattttttctttggcaaaatgagttatattcagctgatacagttttaacatttccgaggaacaaaatcaaaaactgaaaaagcattctccattttaaatggttgatgccttgtactctctaccttctatctgatttactatcatacttttgggttatggttgtaataattcatgtcgaacacaatttcatatttttcaacatgggattcatgatgttttgttcacagcaatcaaagttcatcacagcaaaggaagggaaagaaggtggtcttgttgatgccctgtgctcccctgatgagttgataaagatgtcacgcctttgggctctggagatagctaattaccgtaaaccttggataagatctcttgccagaacagataggcttggttcactgtctgaagctcgttctgtattaaatagtgcaagacagcaagcgaagaaggttgcagcaaacttgccacagcaccaggcctgcctagatgttatggaagaaggtgtactatgtggaggccatgctggtgttctgaaggtttgtaccttccagcgttctccatttatcttccttaaatatgagaccgatgcagcaagtatgcccattttgcactacatttagctacaaagctacctgggcacctttttgacctcatcagatcgtgtgtactgcgaatgtactggatgttagatgcgttattcttgataagtttaaaatctttatgaaaaatcaggtccattgggtgaaatttttagaagaatgtaggttttcatctgatctttctagattgacaaattagaatggcatttatgtttaaattgctcttaggacattgaaaactgtacagtaaaatgtaccaagttatatgcttctttgtttcttccaccattaactacagctgatgtgtttatttactgaacataccttaataaatgcaggaggccaaggttttcaaggagttggtgctatcaccaacatcaaaggcacttgtacatgctttctttgcccagcgtttaaccacaaaggttaccttctagagcatacaatatcatttctttttatgatgcacttcatcatttgtcactgatgtctttgattttgcatcaaatcattaactttcttacaaatacttctaattcttttgatcttctagatatgttgccaatgtctagttacagactgtagcacctgttcttttgaatgacattacctggtcttgtattggaataaatccattttgcaatcctaaacttttcaaaagtttacttgatcctctgaactaggaaattgactatgtataaaccctatacctataaaactgtgcggacttggttgcttccagaagttgttgcagtcgggtttttttagtagatctatatgatcttagagtggattttgccatgttggtactcatgtcagcataaacatttaaaggaataggtgaagaaaaaagagctccaatgactaaatgtggatgtcgaaattcttgagctgtatcactatcacaaaaatctaatgcatagctcgatcctgttttttcaactatttgtttgtggagatgagattttaaaccacattaccttgatatttatatggatgctatgcaagtaggttcgtagatggaataatctatatacaacgcatggaacccaagtttctgcagtcacaacacttaatacgccaaaatttgttttacctttctctgttatggatttcttggtgccattttatgacttatagtttattgtgtgtaggtgccaggtgttactgatgttcaattgaaacctaggaaaataagaaaagttgctgttattggtggtggtttgatgggctctggaattgcaacagctcttcttgttagcaatacatccgttgtgcttaaggaagtaaatcctcaattcctgcaaaggggacagaagatgatagcaggtcatttttgttaaattactgctgtgtttcttgggatattatttgccctcagtatttatttgagatttccttagagttatactgaatgctgaccttttttttttgttatgcttgtgctttaggattatctttatctgttttttcagtgttatattactgataagtagcagcaattatttgacagctaatcttgagggtctagtcaagaggggctcattgacaaaggacaagatgaacaaggccatgtcacttctcaagggtgcattggattattctgatttcaaggatgttgatatggtcatcgaggtaatccctcatatgttttatggttcaagtttggcatagtacttcgtctgtagttattggaagtccctctgttggttgatgaagcatatgaccatgacaatgtattgtgtttatgataattaacattgttattagataactcattttatagttctgtaattcatgtacactgtatttttcatggcacacaattgtttgtttagtctcttatgacaccgttttttttcttcttgtaggctgtcatagagaagattcctttgaaacaatcaatattttctgaccttgagaaagtatgcccaccccactgcatacttgcaacaaacacatctaccatcgatttgaatgttgtgggcgagaagacaaattctcaagatagaattataggggcacatttctttaggtttgttatttcttttcttattgattttgattgcagcagatcctatcaattagcaatacgaagttgccaatttgagtacacttatgacctatgcatgtagattactgaaacccatctaactgtgaagttctcgaacattctctccaatcaaactcataatttacgatggagtaggaacttattttcttagaagaaatgagaatgtgatgaatatgttaatggaggaaatatccagtgggaactcctcagtgttgacatacaaagttacaaaccctgcgtgaaagttctctatcgtactcttgtttttggagcggggtggggggtggggggggggtgcaggatatagggagatgaatgttcacttttaattttccccacgatagtttatctaaggtcactgaaaattcagtgttgagttgttgattgttgtttatggcacttttatctgcaaaagcatggctaatcatgatatcatgcgaaacccagtagatataacagaatataggtaagtcaatccttgaaatgcatgaataattggttcattttaaccatgtcaaactgatcattgtatccccgaaaggcaagcggcagatcagtatggcttaagttaattctaagtcagatgcctatgacttcataagctagtagcttttgcaaacttgcaataactttttatttgggatatgtacagtagtaacttatgtatgagcatcacatagaatgtacggagaagcaggatataggcatttataaataacaataagttctctttagcctttctggtttggacattatatcaaacaatcacactgtacttgtttactgtgagacaccatgttcaattgctcatgttatgttatttccagccctgcccatattatgcctttgcttgaaattgtccggacggagaagacatcaccgcaagctattcttgatctcatcacagttgggaaaatgataaagaaagtccctgttgtggttgggaactgcacaggcttcgcagtcaatcgtacatttttcccttacacacagggttctcatcttctagttagtattgggatcgacgttttcagaattgatcgagtaataagcagctttggcatgccaatgggaccttttcagtaagtgttcaactctatttttatacatctttatgtcgcactagattatcatcacaaatattagtatttgtattgaaatttgtttaaatagacaaaataagataggaaatatgtagtttgaataaattcatggtttgcgttttatgccttatttatttgtatatagcttatagtgaacatttttttagtccaattcaatttatttttgtgggctttagtaagctacatcttttgaaatgtgattggatgcctcctcaataactcaatggaggtcacatttcctttaattgttgtaatgcaacatgtcacttatacctttgtgcataaatatctaatcacctcaaattgcataccttctgtgcatgaacaattaacagtgagatattgttgtgtgccttacctagattatttaaatgaacagtgcagtgctggtccgttgttgattgacctgtttttctgtaatcatcattcccaagggtttttatatctaataaatccccctcttccctctgcactcctgcagactgcaagatctggctggatatggagtggcattggcagtaaaggatatctatgcggctgcctttggaacaaggaatctggactctaatctggtggatttgatggtacagaatggacggcagggtatgcttcctagcctgcttttgctcctgcgatgctgttggttgtagcagataggatggattggacaagaaacagtagtcaaacaaaaaattgatgtgaaatttccctgtattttataggaaagagcaatggtaaaggttattacctttatgagaagggtgggaagccgaagcctgacccaagtgttcaggttgtgattgacgagtacagaagatgtgcaaagacaatgcctggtggaaaggtttccctccttccctgcctgagtcatggatttttcatttaaaaattcccatgctatcccagctggtgatggaaaaaatttctgacatggagacattatcttgcttgcagcctgttactttatctgatcaagatatattggagatgattttcttcccagttgttaatgaggcatgcagggtcatggatgaaaatgttgtgatccgagcttctgatcttgatattgcttctatccttgggatgggttttcccaagttcaggtaaacaactgttgcttaagcttaagttgtgtggtatgttattagcaggtgacaatttacgttcacttgcataatcgtcttatgtaactaaatgctaataattagcatgcacttgaagtatgccttagttgtatcaatatttagatacttggattgagatgcatgtttggtttgtgcacaaatataacatatggacttaaaattttatcagaacacttctgatatctaaacatgaaccttatttaatccttatgtagggtagggctgcatggcgtatatatcaaaataaatttatgttgctttataacgtggtgtttaactttagcacttggaattccaccataaggtattccaaatgagtgtttattgctaagttctgttacatcattgtctaataccaaacaactctcaagttttatattattatgcattcgtgtgaagctgtataattttgtcaatccatgatactgttagccgtcagtcctcacatgtatattttgctttcctttttctttttgtcgcgcataaagtgttgtggttattctgagtgttagtttaacctttgatgttttttatgaaggggtggtcttgtcttttgggctgacactattggagcaccttatatacattcaaagcttagcaagtggactgaaatttatggcgatttcttcaaaccatcatcctatttggaagatagagctaaaagaagcctaccattggtactctctctcttcctctctcactcacacacaaagacacaacgcagtctgtttctgatggatagtacccgatccttgccttcctaattttagtatatgttgagtatagcggttgcaattatgaattagtatgctataggcaaatattatagatctgcatgtgtatcgagtgcatatgattattacaaacatttgagtagtttgatgttctcactagaaagtataaataatcctattagtacatgcaacgaacgaagcctctgtgtcagcactgaccgccttggttcaaaattggttacatggtgggacgaccatgggccctgatcatacagttcgattttgatattattactgcacctgctcatacgctcattcattgtgcttctcgctttagtgttctgtgatgctctatcagcttgttcgataattaatcatgttacaatctctgcagagcgcaccaaacgcaacccagcaggcttcgtcgaggtcacgcatgtgagatgctatttcagctgatggcagaataattgcttgatgtgcatcggcaccctagttgaccctcatatctgggacctgaaaaaggaggtcagagcagtgttcaccatgtaatctcttttggatattttggcctttccggttttccgaactgggttgctatggcaatcggagtaataaatgttggcttcggatgccacaaaactgtaactttatggccgatagccttttactccagtgttacattaaaatgtatatggtacagtgtttttttaacttgtagtaaaataatatgcatgctctccgaatagtcatctcagcttcccagtttatttcacttaaaacgtaagggggaaggcagtaatctgactcacccaagttcgaacgtcttgctttgattatcaatgtaaggtgtaaagtctatcatgtaatgtgttcgttgtggtgatgtgtgtgcccatctactactatgaacaaatggaattttggaaccaagtcagagcattttactcactcactcactcactctgataagtttgatgtattcaaatgttagaaagcaatgaataatacacaaacagaccatgagagataacacagttaaactttcatttgtggcctatattattgtctcttgactgatctacctagcttgtactccctccgtcttaaagtgtagttttgcactattcacgttcaacgtttaaccgttcgtcttatttgaaatttttttatgattagtatttttattgctattagatgataaaatatgaatagtactttatgtgtgattaaatatttttaattttttcacaaatttttcaaataagacggacggtcaaacgttgggcacggatatccacggctgcacttattttgggacggatgtagtagttgttttgtctaccctgaattttgcccatctgacaccgataaacacatacagagtgtcatatgccttgttgatagcttgaaagtaaacaatcctccatgtcttcacaaacagcaagctgcagaacaccatccaaagcccaacaacaaatcccaaagcaagaccaaggtaaaacgacattgtgtcagataaacctttgccttcgtgaagatcaggctggctagttctgttcttttcggatgaacaatttttttgcagaggagggccacaaagtccagcattgccaatgtagatgtacgctggattagcaagagcctgaagctggttccctgaaggtattcttcctgatagattattgtaggacaagttcagttgactcaatgaagttaaatctgacaaacttgaagggatttcaccagaaagcacgttaatcgacaagtcgagagattccagcttttgtaaagctccaattttccgaggaattgtcccggtaagacggttcatggacaggttcaggttgactagcccagttagagatgacagctcatcagggatacttccatcaagaacattgtcagacaaatcaaggctcaccatgtagatgactccactggtgtagctacgatcttgcccctttgtcaccattggcagactatccacgatccgatcgttgcctgatgcgccgtagcctgtaagaggattcagagcaagaggaaggtgattctgtgtcattcctgtcatatttgctagagaagggggtatggagcctgatagcctgttgtcagcaaggtccaagaactgcagatcaggaagctctgttagctgagttgggatgctaccactgaacctgtttgatttcattctcagatgtgtcaaagatggcaacttcctcccaatccactcaggaacgatccccgaaaacatgttttgagccagatcaagaaatgtcatggatttgcagtgcttcaagaacaccggaaattctccggtaaaattgtttctgtacaagatgagagtgatgagcccaaggccatctgatgatatgttcctgcaccttgggaggtgtcctgtaagattgttatttgaaagatccagatgcaacaaatttggaaaccggcaaagagtctctggcactattccacttatcatattggaggagacatctagctcaactagctctggggcaccaaattcctgtggaaatggccctgacaaggagttcctggagagatccaggacaagcaatttctctggcaacaatggcacactgccagtgaggttgttcgatccgagatatatcgcgagcgcagacctcatgaacttcagagaaggtggcagcactccactgatctgatttacagatatgttcaggtagactgcatctgaataggatttccagaaccatggtggcaattcatccactattcctgcatttgagatatcaaggtacttgatgcttggctggtgcttgatccatgcagggaaatggggacccatctgaacatctggaaaataagcatagaccaatttgcaaggaggcttccagcttggcttgatctccattgacagattgttcagagacaaatctatccactccagactcaccaaatcagcaaaatgctcttcagacaagcttccattcaggagattgttatgcagaaacaaccttgtcaggtttgatagactaccaatccccaacggtatctcccctgaaagcttattgaaagacagatcaagaattgtgagttcagacatctccccaatccatttgggtagatggccagacatgttcaccgccgacagctgcagcacctgcagcttcccgaacacgcagcgcggcagccgccgcatgaactccgccatgtcgccattgacgctgttcaccgtcaagtcgacgacctgcaggccgcacagccgctgcaaggttgcagggatcatgcctaccatgtcatttccctgaaggttaagcacacggagatttgtcatattcccgagcgcgtcaggaaatacaccggacagcgcgtttcccgacaggtcaaggtacgtcagcgtcggcacgtcccagaaccacgagttcgccgacgacgtgttgatgacgttggtggacaggtcgagcttctgcagccgtgtcaggttcgcgcgtgctggcggcgacggcgccgccgtcaggccgcagtccgacaaggcgaggactcgcagggaagggaggttgctgacgacgccggcccagccgacggaggcgttgaggttgacgacgctcatgtcgaggtactccagcgacgacatgccggacagccacgagatgtcaccggagtagagcccgccgacgttggagctcaggtcgagctgccgcagcctcgtgaggttgccgagctgcggcggtatctcgccggcgagccccgtgaaggagaggttgaggtaccggaggtcgcagagcgagcccaagaaccgcgggagaggagacggcgacacgccgtcgccgccgatgaggttgttctggctgaggtcgaggtaggcgagccgcgggaggccgagcagcgaacggctgatctccccgccgaggccggcgccgccgtcgatgtcggcgcgcgcgttgtggagcctcagctccgtgacgtggccggtggcgttgtcgcagacgacgccgtcccaccggcagcagtcggcggcggcgccccacgacgcgaggcggccgtcggggtcgctggtgaagccagctttgatggcgagaagcgccgcccgctcgctcgggacgcaggcggcggcggcggcggcggcggcgacaccgagcgcggacgccgccgacgacagcgccgtcagaaagatgatcgccgccgcaccacctgcgcacatcatcatcatggcgccaatgcaccggagcttctaggaattaattaagatctcgggctctcagcttaattagctcggtgattaatcgagcaatgttactacaacatatatagatgatgattctgaaataatctggattattgttgaagtctacgtgaagtcgtcggcgtctattcgcgtcgaatcatgcagtaaaaatcggcgttggtagagcaagtgatagatggtgacccaattcgatcgaacagatcgagtattgatccggtcgatctcggccatatagttagcctccgttggatgttgcgatggatgatggtgcaaccattttcttggatagatatttcggtgtttgacaaattaaacccggaaatgcctcaaatcgggcgcccgccccttcgcgcggggcgacgcgcatccgcgccgtccccaccacacgcaccaccacacgcgccgttgcaacaaatcacccacatattacgaaaacgtcctattaagagaatccatttctttttttattccactaacaatgtttcagcaagtatactcgtaatgtttcactatgcattgatgaaatgttgcagtggatttttatactgtttaatattttctatcttgatggacacatggtttgttgatgtatatggaatttaagtgctacaatggcttcaaatcgtttgttgtatacgttgaactaaattatttcatctagcgatctgaccgtgtttcaatttttttaagaattgaaacattattttgctatttgctgaaatattatttttatataaggtgaaacaacgtctgattttttgaaaaccgttgtttcatacgttgtaacaaaatgttttatgagatgatttgattgtgtttcagctttttgaaagactaaaatattttcgatctatttagtaaaacatatccgatctacttggtaaaacagtcaggcgcccaattgataggtgccttgaattaaactgctttaactctatatataccttaaatgatacgggatagtattattatattattaaataaatgaagcaggtgaaagagatatgatatgtaacaaccgtaattcgattggtaaaacagattataacgattatgtgttttcatttgtatcataattttaaaaaatatgtacaccacaatataatacaataataaggtcagtatagctagctcaatcttctgctatgaagtaaaggtaggtcggtcccaccaagtaaaaataacagtctcgtgaactccatcgctcgagataaatctatgttccatactaaaatctctactactataaatattatttaagatgtttttgttagggattttgtacgtcgtcccgtgtgcggcatgcgcgcaatgatttcgtccaagacgcgcgtgccgttcaaccgtcgattgcgtccgagtccatttcagccgcgcgcgatttgttttccttgccgggcgccgtgatttgtgcacgcccactctgattcgggagtggattttgatccattgagagagaggatgtccacttatttttttacatgtcacttaaatagttataaaataattttaaaaaattgagaagatgtattagcataggatatatcattccacaaacatacgagttcaaatttaacttatattgttctacatctcgaaatgaaaaaaacaaatttgactgtgaatatacattaatagctgtagtttaatttgtttttttcattgcgagatatagaagttgaatttaaacttgcatgcttgtggagtgatatatcacatgttaatacattttttattttttttaaaaaagttataactatttgagtaacatgcaaacaacgaggggcatcccctcgagggatcaaaacagtttcccctctgattcagccagagtccattcgatgccacatgcactgcccgctcgcggctgcctcgcacaccgcctcgcatgagcacgctgcacaagaccgtttccaattatgtataatactacacactttttacatatcgacaagattcttgttttttttaatatccgtactaaacagttagcttggacctaactttgaaacaccaaatccttcgcgtttccagatatatcatatatgaaacaccaaatcttttcttttctcattcacagtgtatgttgcacatgtcatgtcatgtccattcatacatgtccacatataattttttttactcatctacacccttttctccgcctttaaatgttttttctcctaaaataattatccaatctacatatgattacatcattgtattcacacgattatattttgataaaaaatcaaacgatgtttagaaatacaacatttaaaaatttgggctgcaacactagcaaccacttatatgaaacactgagtcctaatgagtaaaacaaaaaaaatcatatcagagatacaatatatttataaaacatgatgttgttgaaatatttttatatcacatatgaacactaaactataattattaaaaaaatataaaatacttgctaaaacattccaagaacaccatgtgcaacatttgcaaatcaaatagtgaaacatcgtatgaatactagctgaaagatttaaatataataggtgcaaaatttgcaaattaaatagtgaaacatcttatgaatactagctgaaacatttaaatgtaataggtgcaacatttaaaaaaattcatgaataaagctaaatattttttcattggatcatagccatgtttggtcgtgttttaaaattttaattgcaatgaatttagtggtgcaatcgaatcatgaattagaaaagtaatttaagaaaaaaaaagtttaaagtttgctcaaagaaacttaaaccaacctaacttttattttctagtatggatgcatggcttccgatacttgcagtgggctgcacctagtcctggtgtgtctgcatgtgttggcggagattgagatgggcgtccgatttttagctaaaagatcagacatccgatctgtagtcacctttgcatgtgaaactctcaggtatttttttagaacgatcactcatctctttcataccaacacctcactccatctgtcgagaaccatgtttatcttctcaactcaggtcccgttcttttctccgacaagagttggataaagattaagattttcgtggcacgcttttcaaactgctaaatggtgcgtttcgtgcgaaaactttctatatgaaagttgctttaaaatatcatattaatttattttttaagtttgtaataattaaaactcaatcaatcatacgttaataccacctcgctttgcgtaaaaaacttaatcttcaagcattctttttttgtcccgttgcaatgcacgagtatatgtgctagtaataaaaaaatatttattgccttgtgatcacgtcttatggttccacaatagtaaatatgttgtattaattgttgcaacatttattgtttaatgttagcttcttcttcttttttttacaaatgtagatgctctaagctcaagccttaatggcacagacaaagccttcattttctgatgctgccttcattttgattattactattcacgagcatgactttagcatctgacctcgcctcatccactaatccttgcgcttggcttctttccatatggacccaggaaaatagcagatgtgtctaaacaactagttgagtcagatgttagtcgtaagaatagctatttcggtgtaagcaaaggtctattgtgcaatatcaagttgttgtacctttattctgaaaagaaaaaaaaatcctaagatatgtgcggtcaaacctcaataatattaatagatttctttgaagaactccttcacaggttacattcttcacattttatgttcttctcgtgaagatttagattttatctcgttttccattagcacattttttaaagtactaaatgatgtgttccatacgaaaactttttctagagaagttattttgaaatatcagataaatctattattcaagattataacaattaaaactcaattaattttgcgctaatgactttcttgtttttttttcctagcttcatcttcatctttagcagaaacgaacaccatagcttgtgaaaaaaagagataaaacatgcctgatagagattgagggattgtatcgatgtctagaatattattctttggagaatgaaggtactagtatttaggctgtgtttagttccacgggaaaattttttttgccgggacacataagatatactgacatatatttgaagtattaaacgtagactaataacaaaacaaattatataatccgcctgtaaaccgcgagatgaatttattaagcctaattaatctgtcattagcaaatatttactgtagcaccacattgtcagatcatggcgcaattaggtttaaaagattcgtctcgcaatttacacgcaaactgtgtaattagttttttttttatcaatatttaatactctgtacatgtattcaaacgttcgatgtgacgagacaaaaaaaattgccggtggatctaaacacccccttattttccgttgacttggcgtctatcccttttatatccgagacttagggactgttcagattgatgtcattttcaaccatatcattttttggtaaaattgctaaaaaaaatgtctacgtttagtttgttgccaaatttggtaaatacatagccaaaattttgatgaggtttattttggctacaatctgaacatgccattaattcgttgtgcaagaatatgttattgcttctaattagtaaaactgtttttactaatactccctccatttcaaaatataaggctcaaccaccctcaatttaaaaactaagaaataattattatcatcttatagtttgaatcaccctaattataaatataatgtatgcatctaatagaatttaagatattgaggatggatgactaaaataataataatttagtgggaaagaagtgctaattaatggtatgcattcatgtatgcattatattatgaaacatttttaaaaaatagttgtgccttatgttatggaacagagggagtaatacaattagcaagatgccctcatttccaactctatctcatctccgtcaagcagagcagccagatcttacatctcaaagtattgtgtaacacgaaagaattacacaggcaattcgaaattaatttcttttaggctataaacatgataagttttctaaaagcattaaaagttatttctttgaaatggacgtgagtacatgaccaaacagcacggcaagtgagaacatgctgcagaattcttcttgggtgcttccacacgtcttgcagcaataattttgatgcaatggtggacagagacaaaaacattcggatcaaatttgctcataaccttccaagttccaacaaatgcatgtcatgcatttgcacaaagaccacacaaggcaccggcgactccactgcagtgctcctgtgtcttctggtatgcatgaacagatctgtaataaagaaagaacagagaaattgcatacgctcttaatagtatttctttttgtgtgtgtgtgtagataataaaagtaattgatgaaatggttatgtgggcataccaagtttatttttcttttacaaaagactagatatttttcaaccttgtcatgccacggcattgttaggttgcagcaaagttgacatgcattaatgacaacagtaatgccgccatctacatagtgtgtagccgtaggactaaatcactagaacctatagaatcgttgcgacaatttttgtaagcaagtactatactctaattaatatcaacaagtattctactttgaccacctctctaacataaattgcacatggcaaatgaacatgccgtaactaaaaaaaaggacttcattttaaaattaaatcatcatggtagagcagaaaaacagagatggagtaacaattatatgcaagtactcatatgtacggacattagttccatcattttcacaatcacttacacttgctgactaattcgctgaactggtctccacggcattgcaaaacgacacgcacattcttgaaaaatgtagcagtactcctacatctgtgctgtacatgatttcgacgtgaaattccattgtaggcgacgactccggatagactaaaatcaccagccacggccagatggtcaccaatgaaactatgaaagacgtatagtatggtttatctgttgggttatcgattgaatcggcagcgctaactgtgagatttgggtcaccgacttgttcaatgacataattttgttgttccatcataagaacgaagatgatggccgatccgccgatatgtgttcttctgtttttacgcgtgtcggagttgatcaatgtggctgtgcacatttgctcgtaggcattttaaagatatggagccccttaggataatgctgggtgtcggacgttcgacggaaggggagaaaaatcgatatgcatgtgtctgtcattacattcaaagaatcttttacccatatgctcacatctcttatttcttcaaaagatttttttcttgtaaactatttatctaatctacgatctgattgcagcactaaattcgttacaattaaatctttaaaacaagaccacacatgattatattttgaaaaaaatattttagtttttttattgatttttttaatgttgcatatggtctcttttgatgtttcaaccagtagttttataatgtttcagctagtgtacttatgatgtttcactatgtacggattaaatgttgtagtggattttgatattatgaaacgcgccgcattgcaacaaatcacccacatatttcagaaaccatctattaagcgatttcgttttattttttgtttcacaaaaaatgtttcatctagtgtacttacaatgtttcactatgtatagtctaatattgtagttaattagaacattcttttgcaacaaatcacccacatattttggaaaccctctatgacggagcttggggctcctcaccgggagaccgcgcagggccccctttgccggttcggccgggggcgctatgtgaggttcttcgccctcgatctaaggaatgtcagcgagaagaatcgcacaagacacgggcgacgtagacaggttcgggccgctgagaagcgtaacaccctactcctgtgttctgatggatctgtgtgtgaaggaatacagagagccggagagcgagagaccgttcaggctctagaacccctccctcctcttctcctttttctctttttttcctctctcttctctctctccttctcttaggcctgggcctcctttttatctggtcaggggtcaccacatgggcctcaagctgcctaagaaaagaaacattttttttacaatgagggctagtctacagccggaagtgacccctgacaagcacagcacacgccttctgctccgctcgtcagctctcccggtggacgcccgtttcaaccttcattcaatggccagcgactttcttgccatgcttgcgctgaagcctagaatggatctgaccgggactgacataccaactccaggagtcagcacgccagctccggctagagacgagagccaggaagctctcatcattccgacgggacggggcgaggcgtgcgacaggccgcctgttgccacctaacccgcgatctgaccagtctgtgaccggtcacataccgcgactggtcacggaccggataagcatgcgctgcgccgcattgaatacggcgtggcgcgcttgtctaacccgctataaatgcggttaggtgagcgccgctgtgctcacctaacccacacacgtggcgccaacaccacagggggtcggggcgccccagccctcggggctgaaacgggagcggcccgacccctcggggagacagagggaggggtggccacgtgggtgatcgcggctacccaagcctctagtcacgatacccccggccccatgtcaccgacagtagcccccggcgttacgccagggcgaccgcccccctcgagggaggcgctcgggcgtgacgccactccttaggcccggtgacaggtggggccggtctccacaggcgggcagaaacccaacggtcgcaaatcgcgcgcatcggcaagggaaaaaccgaccgacaataatgagcggcatcttcaagaccgctacattactcgagcagcgcgcgaatcgggacgagccggtttgtttcacctggggacatgatgatggcgctttttgcggttggcgagcgcagttaatgcgcgcacgatctgccccatctcaaccgccacggccgcacatctgccgcgtgcgccgcaaacgggcgagtggggttagtggaggcgtgggcgcgagaaacgagggggcgaggtagtgggcgcgggaaacgaggagccgggcatagcgttggcaagggtgtaaagacgccgacgaagggattcgtttccttcctctcgccactcttccccttgcctttgccacttgcgctctaacttttcgtttcctgtgccctacccttgccgcactcgctcgctctcaagctcctcctccgccggcgtcatggcacggggctccgcaccgctcgacggtagcgtgctgccgccttcccgcatcgtgagcgagaggcaggccgggctgccgcgccgattcatgccggaatctgccaccggccgggaagtggtcgcgctgggcgagggacgcccggcgccacactacccggggcggtccgtcttcttcctctctttcgcaatggcggggctggtcccgccattctctacttttttcatggatattctggagttttatgatctccagatggcgcacctcacccccaacgcgataatgacgttggccatcttcgcgcacctgtgcgagatgtttatcggggtgcgcccatttcttcggctgttctggtggttcttcaccgtacagccggtgtcgccgccaacggtagtcggtggctgctacttccagccgcgggggcaggtgctgaaccgctacattccctgcgtccttcgcaaaaagtgggacgactggaagagcgattggttctacacccccctcgccgacgaagcgcgcctccgacttccgagccagcccccggcgcaggcctccagctggcgggcggcggtagatctgggagacggctacgacgccgttcttgaccgcctggtgggtctgtgatcccaggggctcacgggggccatggtgtttggcgacttccttcgtcgccggatcgcgccgctccagcggcgcgcccggggcgcctgggagtacaccgggcccgaggactacatgaggacccaccaggggcgcaaatgggactgggaccctgaggacttcaggatggtggtccaacgggtgctgaatctcagctccgtggaggcatccctcatcccccaaggggtcctccccctttgttgcgatccagagcgcgccaacatcctgaccatcatgcaggtggtcggggcgtcgggggagcgggccccccgaggccacgatggcgcgggcgggagccgcaggggggaacaatctaccccgggagggggtcgtgcttctgggccccgtgacgggggcccggggggcagccgccctgccgacgcccgggggaagaggaagcaggagggtacccctcccccatctcctccccaagggggcgtggcggtgcgtgccagcagcaggcgcccggaaggtgccgtgccgacgccgcagcccgagggggagcgaaagaagaaacggctccgcaagatgagggggaccgagccatgccgggggaacctcatctcgcccccgaggtggtcgtttagccgacctccccgcaggttcgtccccgcgcccaccgcggccgtattcattctcccatctcccaaggcgagttttcactcacccgtttctttttgtcttctggtttttcttctgcctcagcgagatcccgtcgcgccctcccccgccattccaaatccggccggtctgaggccgaggagacggcgaccgcggaggcccggaggcgggaagccgaccggcgagaagccgcggaccgcctccgggaagccgaggaggcagcccaggaggccgtccgggtccgccaggctgaggaggccgctcgggaggaggccagactccgccgggccggggagtccgtccgggaggcagaggcggcgcgcgcacgccaggcggcctgccaagcccccgacccgactccgcccgaggcgacgacgacttccgaggccacccacgacgaggccgcgggcgcgccgctcgggcccgacccctcgggcgacgcttgggacgagccagcttcgggggacgcccccgagtccggcacgtcgatcggtgggccgagccgcgcggcacccacaccgaggcggctctcctctctgccttccgctgccccactgagcgtggagcccctcctgcaggccttggccgccgcgaacagcacggtactggacgggttaagtgcccagatggaggtcctgcaggcggagcgggcggagctcgacgcggcgtgggcgcgcgtcgaggaggggcggcgctcagtggaggccatggtggaggcgggccgcaaggcacaccgccggcacgcctcacagctcgaggcccgtcgtagagacctggcggagatcgccagggaggtggaggaggagcgggagactgccctcatcgccaccgccgtgctcgacgaggcgcgggacgacctccgcctccaatacgggaggcgggcggcggagctagaggagaagctcgacgccgcccggggagtccttgacgccgccgctgcccgggaatggcgggcggcggagaacgaggcggcgtcccggcagcgcgaagaggcccttgaggctcgcgccacggcgctggaggagcgcgcccgcgccctcgatgcgaaggagagagacctggcggaccgcgaggccgccgtcgccacccgggaggcaacactggcggcgcacgaggccgcctgcgccgtagaggagtccgcactccgcctccgcgaggacgcgctcactgagtgggagcgagctctcgaggaggccaaggccgcggcgcagcggctggtggacagcctgttcctccgcgaggcagcgcgggaggagcaggcgcgccgcaatctggaaggcgcccgcgccgagagggccgcactggatcagcgggccgctgagctcgaggcgcgggcgaaggagctggacgagagcgcacagcggcggggcggctgcgggccacggcgacctagccgcccgcctcgcagccaccggacacaccatcgccgagctgcagggcgcgctggactcgtccgccggggaggtcgaggcccttcgcttggcgaacgaggtagggcccggcatgctttgggacgccgtctcccgtctagaccgcgccgggcggcaggcaggcctctggggcgggcggtacacgaagtacgccgccaaccaggggggcctcgcccagcgcctctcagagatggccggggccctcgagcggctccccgaggagctcgaggagacgatcaagtcatcctcgagggacctcgcccggggggcggtggagctcgtactggcaagctaccaggccagggaccctgacttctccccgtgggcagcgctggaagagttccctcccggaaccgaggacggcgcgcgcgcgcaggtccgggatgccgccgaccacatcgtccacagcttcgagggtacggcccctcggctcgcgttcgccctcgactccgacgaggagggcggtgacgacggtgcggacgacagcgacgacgaggccggcgacccgggcgcatcggagtgagcccccaggccctcgccaatcttaataacttttccttcttcttgcgaggccttcgagcccccttcttgtatagactgatttaatctgcaatcaagtaaagaggaaatttctgcgtcagttctgtttgttgtgtgtatgagacgaggatggtctgtgccgcggtccttctgtgtcttggcttgaacaagggctcgtgcccaggtcccagcctcaagcggcgcgggtcggggctagtgcctggggagatcctcgtgtcgagactggccaggccgagagcgcggtgaccgagggttatgatgacccgattgtgggcctttgccgattcccccccggagttcaccacgccccggggcacggctcggttctgggccccgtttggcgattttagccggcccgggccaccgagggcagggtcgagcacgagcgtgctaattcaagccaagattcttcaaaaggaaacgatggcacagacacagtcctcaggaaatcgaaaatgcttttattgaaatacggaagagaaaaaaggtaagtatatgcatgtggtagcccccggccaaccctgcacacccggggggggggggggggtgcggggttggctcgagcccgagacacgacccccgacccccactaggggtagaagcgacgaatgtgttcgatgttccacgggttaggcagctctgtgccgtcgcccgtggccagccgaacggagcccggccgggggacgccgatcactcgatacggaccctcccacattggtgagagcttgctcagtccagcacgcgtttggacgcggcgtaggatgaggttgtcgacgcagagtgatcaggcccggacgtggcgctgatggtagcgccgcaggctctgctggtagcgcgcggctcggagggacgcgcgccgccttcgctcttccaaatagtcgaggtcgtctcggcgaagctgatcttgatcagcctcgcaatacatggtgacccgaggggacctcagggtgagctcagatgggaggaccgcctccgcgccgtagacgaggaagaaaggcgtttccccggttgctcggcttggcgtggttcggttcgcccagagcaccgctggcagctcctcgatccacgagtcgccgtgcttcttgaggatgttgaaggtcttggttttgaggcccttgaggatttccgcgttggcgcactccacttggccattgcttctggggtgggcgggggaggcgaagcagagcttgatgcccatgtcttcgcagtagtcaccgaagagctcactagtgaactgggtgccgttatccgtaatgatacggttaggcaccccaaaccgagcagtgatgcccctgatgaatttaagcgcggagtgcttatcgatcttgatgaccggataagcctcgggccacttagtgaacttgtcgacagcgacatacagatactcgaacccgcccggggcccgcctgaacggacccaggatatcgagcccccagacagcaaacggccacgaaagaggtatggtctgcagggcctaggccggctgatgggtttgcctggcgtggaactggcacgccctgcaccgccggaccaggtcgaccgcatcgttgagagccgtcggccaatagaaaccctggcgaaaggccttgccaaccaaggtgcgtgaggcggagtgggctccgcactcgccttcatggacatcggcgagaagctcgacgccttgttcccgaggaatgcacttcaggaggactccgttagccgcgcgccgatagagggtcccttccaccagcacgtagcgcttggagatgcgccggacgcgttcactcccttcgcggtcctcgggtagagtcttatctgcgaggtacgcctggatctcagtgatccaagcaatcaatctaggggagctgggagcgctcccctcgggccccgaggcctggactccgacgggcctcgggggccgttcaggcgcgtccgtcccccctagggggtcgggtcgcgccgacggctgggcaagcctttcttcaaaggcgcccggtggggtctgggctcgcgaggaagcgagccttgagagttcgtcggcgaccgcgttatcccgtctgggcacgtgccgaagctctatctcatcgaaatggcgctccatacgccgcacctggcgcacgtaagcgtccatctgcgggtcagagcactggtactccttacagacctggttaacgaccaactgggagtcgcctaacaccaggaggcggcggatccccagtccagctgccactctgagtcccgcaaggagtccctcgtactctgccatattgttggtcgcccgaaagtcgaggcggaccaggtatctgaggacatctccgctcggcgaggtcaacgtgacccccgcaccggcgccctgaagagacagggagccgtcgaactgcatcacccagtaggcggtgtgaggcagctgcgaggggcccgagctggcctcgggggtggagacaggctcgggagctggggtccactccgccacaaagtcggcgagggcctggctcttgatcgcgtggcgtggttcaaagcgcaaatcgaattcagagagttcgattgcccatctcaccacccgtccagtaccctctcggttatgcaagatttggccgagggggtaagacgtaaccaccgtgactcgatgcgcctggaaataatggcgcaacttcctcgaagccatcagaatagcgtaaagcatcttctgggcctgaaggtatcgggtcttggcgtcccggagggcctcgctaacgaagtagacgggccgctacacctttcggcggggccgatcctcttcgccaggggccgcatctccagggcgctcttcgtccgagaggccgcgcggggcgcactcggcttctgtgccgacgacctcggggtccgagggcgacaggcgcggccttcccgcagtggccccggggccatcctaggggtcgggggcgcctggcaccgtcggacaagcaggcggagggccagctccggccgtcgggggccttgggccgccgttcggctcgggggcctctccttcctgctctctcccgggtcgagtcgacacagggtggggatgcgcggagcgagggttgtcctcgtcgcgctccacgaccaacgccgcgctgaccacctgtggggttgccgccaggtagagtagcaacggctcatctggctccggggcgaccaggactgggggagaactgaggtacgccttcaactgagtgaaggcccgctcagcctcctccgtctaggtaaacggcccggagcgtttgaggagcttaaataggggtagtgccttctctcccagcctcgatatgaaccgacttatggcggctatgcagccggtgacgcactgcacatccctaagcttgctggggggggcgcatccgctctatagctcgtatcttctcggggttggcctcgatgcctcgggcagagaccaagaacccgagaagcttgcccgcaggcacgccgaacacgcacttatcggggttcagctttatgcgggcggagcggagactttcgaaagtttccgctagatccgagagtaaggtctcttggttgcgcgtcttcacaaccaagtcatcaacataggcctcaacattgcgtcctatctggctacccaaacaaattcgagtagtacgttgaaaagtaggacctgcattctttaacccgaaaggcattgtcgtataacaataagttcctatgggggtaatgaatgcagttttttcctcatcctccctagccatgcgaatctgatgataaccagagtatgcatctagaaaacacaaaaggtcgcaccccgcggtggagtcgacaatctgatctatgcgtggcagggggtaagggtccttaggacatgccttgttaaggtcggtgtagtcgatgcacatccgaagcttgccgttcgccttgggaacgacgaccgggttcgccagccactccggatggatgacctcacggatgaatccggcctccagaagtcgcgccacctcctcgcggatgaaggcttgacgttccggggcctgccgccgcactttctgccggaccggccttgcgcccggccgcatggcgagacggtgctcaatcacctccctggggaccccgggcatgtccgccggtctccaggcgaagacgtcggcgtttgcccgcaggaaggagacgagcgcgtcttcctatttgtcgtccagaagaccaccgattcgtgtggtcttggacgggccgtcacccagggcaacctccttgaccgggacttcgtcgcacgtgaccatccgctgccttggggcggccgggacggaggtgctgagcctctcgtcgccacccgcaggcttggacgccgcggcgaggtggtccgcgcgctgctccatacaagcaagcgcgactttgaggtcgccatggacggtgatggggccaccggggcccggcatcttcatctggagataggcgtagtggaccgccgccatgaacttcaccaacgcgggcctccccaggaccgcgttgtagggcagactgagatccgccacatcgaagtccacccgttccgtgcggaagttggcggaaccaccgaaggtgaccgggaggtcgatatgacccagcggccaggtgtgccccggcgtcacaccgatgatcggctgggacggccggagcaccatccccggggccttgatggcatcaaaggctgcgggggagaggatgttgagagctgcacccccgtctatgaggacacgccccaacttcacattgcaaacggtgggggaaaccaccatcgcgatctgtcctccccgggcaacgcacggcgggtggtcggtctggtcgaaggtgaggggaacctctgaccaccgcgcccgccgcatcgcctcatgggtaggggccgcggccagaagctctcgcttcatggccttgaggcttcggcgagaagcatgagcgcacgctcccccatcgacggtggcgacggtggcctcaggctcctggaaccccaggtcatcgtcgccattgtcgatgtcttcggcggtggccttctgcttggcctcacctcgccggttgctggcgggagccgccggggtcttgccctcacggcgctcctgcctcttctcctcctcccacttcctcgtccgctcagccaaacttttgaccgcgcggcagtccgcgaggtcgtggagggaggtgttgtgcacggtacaccacttgccggttgggcgctccctgttgggagcgccggcctccttctttttgtcgttcgcaggcctcccctttcggggggaccgcgaagcgccctcggcggcgaggacatgaccctcgtcgtcggaacgggccgacctcttcttcctcctcctgtcccaccgccctgaccgagcggctgactcgggggcggccggagctgccacgccagagccggaggagttccaggtccaggcctcctctttgcgagccacacggtccgcgagctcaaaaagctgcgcggtggtttggggctccttggaggcgatcttctcgagcatgcggttgtgccgcacgccccccctgaatgcgtagatcaccgcgtgtgcggggatgcatggtatggtgttgcggacttgacagaaccgctgaacgtacgagcgaagagactcatcgtcccttcgctgtaccgcatgcaagtccgcttcttcgcctgggcgcgaatatgtgccctgaaagttcgtggtgaactgctggcacaaatcctcccaagagtggaccgacgcgggtggcaagttcattagccatgaccctgtcgtcacccccggcggcctcgatcccggttgtgtagatctggagaaactcggcggggttgacgcttccgtcgtatttttcggtgatggtgggccggaaccttgggggccaacggacgttcctaaggctcgccacaaaggctcgacagccggcaccgccaaccggggacacggggggccggcccccgtgcccggaccgaagtggcgctccggacgaggaagcgccctccgttgcgtgggcggcgcgacgatcgtcgcgccggcgctcgatatcgagccgggcatccggccccccacgcacatcttcttgggtcggaggcgttgacgagggaatggcggacgaacagcgggtaacggccgccgctcaccgcgccctccgcctcgacgacatggagccggcggcggcagcgccagaggtcccggtggcggaggaccgcctgccggcgcctaggcgctgctgtgccgtcatgaccaaatcggccacgtcatccagccaacgtcgggctggagtctctggatcggggacgacgggcgggtgacgcaggagcgcgcccgcagcctggagcgcgccctggggcgtgccgccatcgccgtagacgaggcggcgacgcgccccgtctcgccgtcctcccccgttgcccgcgggcggcgaagtcgcggatccttcgacctccccgagcgcctccccccgcccaagatttcggcgagagggggatggtggggtgcgagcccgacggcgcgggttctgctccccgtcgtcaccgctagcgttcggagagaggctgtgcgccactgcccgttcggccattgggctgagcgggagaagcttggcgcacacgaaagaggacgagggcttagaaagacacgcgcgccccctacctggcgcgccagatgacggagcttggggctcctcaccgggagaccgcgcaggccctcctttgccggttcggccgggggcgctatgtgaggttcttcgccctcgatctaaggaatgtcagcgagaagaatcgcacaagacacgggcgacgtagacaggttcgggccgctgagaagcgtaacaccctactcctgtgttctgatggatctgtgtgtgaaggaatacagagagccggagagcgagagaccgttcaggctctagaacccctccctcctcttctcctttttctctttttttcctctctcttctctctctccttctcttaggcctgggcctcctttttatctggtcaggggtcaccacatgggcctcaagctgcctaagaaaagaaacattctttttacaatgagggctagtctacagccagaagtgacccctgacaagcacagcacacgccttctgctccgctcgtcagctctcccggtggacgcccgtttcaaccttcattcaatggccagcgactttcttgccatgcttgcgctgaagcctagaatggatctgaccgggactgacataccaactccaggagtcagcacgccagctccggctagagacgagagccaggaagctctcatcattccgacgggacggggcgaggcgtgcgacaggccgcctgttgccacctaacccgcgatctgaccagtctatgaccggtcacataccgcgactggtcacggaccggataagcatgcgctgcaccgcattgaatacggcgtggcgcgcttgtctaacccgctataaatgcggttaggtgagcgccgctgtgctcacctaacccacacacgtggcgccaacaccacagggggtcggggcgccccagccctcggggccgaaacgggagcggcccgacccctcggggagacagaaggaggggtggccacgtcaccctcgggcccaacccccccgagggggtcgggccacgtgggtgatcgcggctacccaagcctctagtcacgatacccccggccccatgtcaccgacactctattaagggaattcgttttattttttttccaaaaaaaatgtttcacctagtgtagtcacaatgtttcactatgtatggatcaaatgttgcagtgaactgaaatattctttcgctatttgctgaaatattgtttttataaaagatgaaacaacacccaatttaaacgattgaaacattttcgatctacttagtaaaacaattccgatatacttagtgaaacatcgtgcaacatttaaacataattctataataagctaaaaaaaatttcgtcggaatatatccatgtgtggtcttgttttaaaattttaattacaatgaatttaatggtgcaatcggatcatgatttggatatataatttaggagaaaaaatagtttaaagtttgcttaaaaactttaaccaccctaacagttactagtatacatgcattctgtgcgagcaggctgaattagtttgcatgcatgcaggctgcgtctgcatgcgctgacggagactggggtgggcgtccgatttctcctaaaagatcggacgtccgatccgtagacgccccccccccccttaggtttcggttgacaatttcaagcacaagagggataaagtcctcgttttccacgctcacgttttctatactgctaaatgatgtattttttaaatagtctattgcttttaaataattatattaatatatttttcaagtttaaaataattaatagtcattactcaataaatcataacctaatggtttacatggttttacagtctacttatttcccctccttgcaaacacacccagtctactttgacattttttttcctatttgtggctgtaaacttgtaactatgtttttttttctcgaataacgtaatctatgttattatttaatataatctacctgtttcaaataaaaagtataatgataatatcatttgaacgcattgcccacgatgcctggaagcatacttaggtgaatgatgatacaccgtacattgcatcttacatctgtttgttgctctaatatatagcttggcatcattgtaacacaaaacgctatctgatccaaatccttctctgctccacttgacttggtgtcaatatgtaaacgatacgtttacttgtacacatataatagcagtttctctgctccgctgatgtttccatggcagtagatcagtacaatgttttcatgattattatggacagaaaaaaaaactagtctcaactctaggtgtcgttctggcaaggcctatgagaaacctaagagaacttcggctggggacgcctagagcagataaggcattgtcggatcatgcagagacaaacgaccatataagatctggtcatataagagttctcaccgtgtgtattaaccaagccgtgtaatcggaaattgagttttccaacttcacggctgggggctagggtcagtactttttcaaccaaggcaggtcaagggtccaagagccttatcctctgagaacgattttctgatgacaaggctaggggctagggagagtgtatggctcaggtgactgatcgaagtcgcaaagtgagaaaacactcatacacaacatacccagagtaagaaaacttagatagattccttttctattttataagtatttcttacaagtcataaatacttcaaagtatattacatgcttccttaagatgtttttctacaggatacaaatactaccaggacggccaacgccaatccatggagcgaaaaaccttctcggcgagcggcgccatcgactgtgcaaggccgtcgatctccgcgggtgtcctccgagaacgcaagaacccttcacgcaggaactcgaggtacagctgcgggcggtgatctcggatgcaggccagcacatgtcctccggcgtagcggcttgcttgacgacacttctgcttcagggcctcgtcgatgcgcttgccaatcccttcgagctgtgcgcaggcccattcaactacgagatataaccagccgccgactcctcgggatctccgcggggaactcggagctccttgcaaaccctcgccatcgtcgtgcagcaactcttgagatacgagttgaaccacacctcgcgacctcggagagcctccacggcctggtccttcttcacctccaccatggttttctcgagttcggccacctcgagcttcgtcttccaatattggattcgacgatctcggtcagccaacatgttctcgaagtctgcccgccacggaaaggactgagtcaagctactcttctcttccgagaacacggctaattaagtcaatccaaacacaaggagtgaaggagaccaagacacaaaccttgggacatcattgccatattcgcctccgcggacgggctttgactgatctcctcccgcggcacgaacggctcgagcgtaagcgccggaacaatcaccggcatatcgggctgcccgtgctgctggatatcctcgatatcaacatctctacaatgacaacaaagtactcggaatcacatgctaaggaaacaagggaaacagctgtttagataagagcaatttggatccacaaatagttttacagcatgaagatatcctactcttcaaaaagggggaggacggactcccccaagtcaccgacttcttccgtcataatcttgcgcgcgtcatcggcggccccccgatccaaagctctcttaaggtctagatcgggatgcgccagcctcatgcacgcaaggacgtggcatgctccggtatagatgccgttagacgtctcctcgccgatcctggtcacgtgcttggaggggatctcctccatcgccgtagtcagttccgcgagcgacgacgtcagcgagaactcatcggggtacgccgggatagtagtcatgacaccgcactccccgacaagttagtgcaggctggtgaacgacgtccgcagagaaccgcggatgtcgatcatgtggccctcgagctccgacatccggtgctcaagtccacgccactgcatctcattgccggccaccagctccctcatcttttggaggtcctcgtgagcctccgccaggtcgcgcgccagctggtcggcacgctggtttgccgacaacgccgccgccctggcctcctcgatctcgcaacctacgccgcaagcaccggcctggaggaggcgctccatctccgcttggagttctccccaggtgagggcgtcggtggacaggctccgggtaggcacgaggctgacgacagggctactcggcgtcacctcctggtccttagcggtaaccacgaatcctgtcgaggttgccgtaggggacgcgctggaagcagcatcagtcctgccttgcgccaccttcgcccgcgccatcctgcgaatatttgccttctcttcatgaggctaggcgatcaaaacttcgagaatgaaaagacttcaagaacgtttacttacttctcgccgatcgtcacgaacctctgccttcgctgaggcagaggggacgcgtccgagtcctgagtaagatgaaatggggtgaggtcaagtcgttccgactacgcgctaaagaacgagagagaggcttaccgcagagttcgtcgctttccgatgggtcctgagtacgaaggagaatttccttcccctctttggaacattgctgccactcgtggtggcagcaacaacaatgtcagacgcctccttggcgacgctttccttcaacgacgctgccgcctggtggtccacgagtggcccgatgacgtccgtcagagggagagcctgcacaacttgaagtcacaacgcgatctcgagaagaaagatgtaaaggaatcatcgagtacactcacattaattgcagcgatgcgttcggccgggttcttctcgcaaagagagacggggatgtcgtccgccgctgagggggcgctcatcatcacctgtccgacacggcgttccacggtgtcactgtccagacctgtaaatcgagaacgagaactcgataagtcaggagaaacggatgcactcggaacaaaattagaaatacgagaaaaaaataccccgaggagagacccgggtcgtgtcctctggcctagagtaatcaaaggccggatgggcgcgggcctgcagcggttgaatccgcctatctacgaagtcggcagcgacttcgtacaccgacaacccccgttttcggagatcatcaatgatgtcgatgaaagattagagggagggagtcagggcgggtttggtggtccactctgggattttgtttggctgttctttagggacaacaaggacgggatccgagttctctatctaaagatagaaccatctcgctcgccacttgctgcgagaagaggggcattggaaggggatgtaacgcgacttcagacaatcccgaagtcggaatccaacgcatctagataccctgttgggttccatccaacgcaactcatagtaaaagcagaagagatcaaggaagggctctactgttggtatttgatacgattacagataaaatccgcaagcgcacggatataccgatgtagcacttcccctacggagtattccaagggtatggaatccaagagaacgtgtgtgatcagagcttcctccggttcatccaaagacaccaagcaaatgataggccaggatagagaggattgactagtgagaaacagtgtctagggaaagcttaattttaatcctaacgcaatacttcaggcattggtaacccgttgttcccagatgtcgctctactacgtagccggacagggaggactcttataattcagctcaagcttggaagtgtatgtgtaaagtgaggaagtgaagccttaatatagaggtaggtatgacggttagcgaaggggaaatgtccgaactgccccgcaaccgtcattgggagagcatctggagcgtccacgccaaaccccaggatcaacggtgattaggggggttcggccgaaccagggggttcggccgaacctaggggtttagccgaacctgggctgggccctcctggcctggccttctgtcacgcctagaaattcactaaccagaatttctaggctgaatgtgcattaaatccctgtccaggaccagccagggtacacaaacgacaattgttgacatacagatccacgtcttacaaaaatataaaagattacaaatgcagcggaaaagataaaacgagctaaacttggaaacttgacttctacagtggggcgactctattccacaggcaatccttgacggcagcgacgaaaccaacttcaacaggacagctcccactaggaagatcttcagctctagtgtgggggaaaagagagcaagactgagtactacccactgtactccgcaagtcataccggaaaaggaggtaagatgcatgatataaacaaaggaggctaggggttcatttgcacaaagctagcatttaaaagcagtagttgaaagcagtaaaacaattgtagtaattaatcaatattaaccaatcactgtccaacgctacaccacgttgcaataggcccaaccaaccacctgaactacaccagttcattaagctaaacaaggggtgagactaatcacggtgaatctggttgatcgcccataaccgcgggcatggctattcgaatagttttactctggccagaggtgtacaactatacccacaagacacgattccacacatgtcgccatgccccgaagtatcaccatgatactgcgaagggggaaatcgtgacaagaccctccgcataaccctcccctaaccatccacaccacgctaaggtttcacccccacccctcaaaaggcagtggacggtcccctcttgagtcgcggtgaatccggcagctagacaaccggacaccccgaccgacccaactccatcacgcccaccctcgccaccgatgcctaggaaagggtcgagctatattttagatcaagcagttacccactcccgcttgtggtaaacacggtaagtctcccagggtttcccgtgaaccggtccttaattgccatggtgcgaccagcaaaaccatgcacccacagcccaccattcagtgtattttaattaactaacaccattgcggtggcaccaatccaaagctatgctaatagtcaaagtctatgcaataatgtgatccccatttgtatactagttgaactaagcatggctaagcatttcctaaaccaacatctagtcattttgatacccatgttatcaatggcataaggtaaacaatatatggctgagtaaggggacccatcccacatgacattgtaaaagaatgtaacatttaacagaaatgcgggatatttgtaaattgggtacaatatgatcaattgtaatgcatgacttgccttgctctcgcacttatgagaccttagcaacgtcttcgagaaaccgcggatcgacgaaacggccgagatctatgcgacaaacaaagcacacaagcaaaacatgctataagactactgaaacaggaaacaaaaccatttttaatggattctagggatttttatgaatttactgagacttgaatggacttaaacggagctcggatgaattacttatgaattttagaagataatctatgtttttactaacaaagaaaagtccttaatcaatttattgcgcaataaatccccagggctgacgtcagcaaggggggcggcaccggcaagcaggccccgcatgtcagcggctcaagagagagggagggggcgccggcacgcgggccccacgggcagcggcacaaggcggaaaggaggcgcggctggcgggtcggcacagctcaagccggccggccatggtgcggcagcggcggcgcgcggccaccgacggcgaccggcgaacggccggagcggcggcgcggccaacggcggcggcgcacgcgggaagggagagaggaggggagggagtcctcactagagggggcagcggcaaccgacgcggaaaacgagggtggcggcgacgaccggcaatgccgaggcgcggacgagcggcggtggcaccctaggagagagcagagatgggttaggggtggggtaagtgaccacggcggccaccattgttgaccggagacggagggggatggatatctcaccggctcgcgagggagatagggttccggtggggttccggcgacgcgaggcggtggccgagatgacccgcgcaacgacgaagctagcggcggcggcggctctagcggcggcggtgcgcggctgaaatgcggcggtgagcggcggagctcgggagagcggcgcggcgacgataggaagcacgggagggcgcggcgagtgagggaaatgggagaggaggtttgggggagtgtttttatgggtgaggaaggggtggacgtggccggggatggcccctattgcgccagcgacgtgggggagtggggaggaaaagagagataggagagacgggattcaaaccgaatcccggcctctaaacgggcgcgcgcgcacgggagaggtggaggaggtgggcggcgacgtgggcgcgagcgcggggcacggagtgggcacggagtgggcggacgacgtgggcggctggagcaggcggcggcggcgggaggttagggatgacccgacaggtagggcccacctgtcggcgcttgagagagagagggagggagagagaacttcagggaggagaggggaggagcgggccggcccagcaaggacggcgcgtgggagggaggttgggccgacggcccaacaaagaaaaagaaagaaaagaaaaaggaggaaatggaaaaaggatttcctgagggttaaatattgcacttgctcatttttaattggttaaaattatttccaaggctctgaaaattccactaaaaatcctgttaatatattgcaacatggggaactcaagaaaaattccaccacgccatttccgattattaattgcattgattaattagggattcaactctaggttaattaaacaatttcttcgagcaatttatttaaccaatttttttagcaagaaaagggggaaacttcagggcgtgacaccttcagtcggtggactccctgggctctcctctgtccatttctcggagttttgggttgattcactaatgttttgataaagttcacaacccctccttgtaaggatgcataattctcctcactttagtccgatttttctcccaacaccggggtttatcatctgcatacaaatatacaccaacacttgtggaatatgtgagattaagcacctatcactatgttggatgttttattatctgatctttatgcaaatgttggcggtatagaattgacatttaacacccgccaacatctaccccaatgtaggcctcgcaaagatgagaaaagatgctaaagaatgcgatggagttgaggttcaagtgaagcaaagaaagaccatagaagttcaagacaagaagaagaaactcggaaggcggaggaataaaaccgcaagaaatataatcttcgaccacaaccatgcggcccaagatgggttcaggttctatacctcctgcctccctctgcatggtcccccgaccagggagggcaccgtcgtcttgcagcttcttcatggacgcgatggtggaggtagacttttcaagatccattgccgccggaggatcaccgaagaacaagacggaggaaatgagctagggttttctttgcgggaagcggagaagacgaagagcgctaggaagcaggagagtttttggcaaacagacttcaaatggattcccaaaatccctttaaataggtacacttccgacagtgcgtatcccaaggaaaggagagagattgccattggaaaatcctgggtccattgcgcgcggcagtttttagacttcaatttaaattcactcatgaccgttgaacttcatgcggtgttgtcgatggctcttcgtctctacggttttcacaccgagatcgaccagatgagaacgacaacaattccgacatcagaagtcgcgatcgatgacatgagctcatttaagcagaagtcgggggctactgtcagggttacggataaggtataccctctatccttggatgtacattgtatacagatacggtatacccgcacgtatacggatagtttccgtatacattaaggaaatctatcatgtgatatatatggtatctacggatggaaagagttctactcggacaatactaggtctttatcatatcgtgaggggtccgatatctccgagtcctacttggagatcaactgacccgcggtataaaagggaccccctaggcaggacctaaagcatcgaatatcaccgccaacatacccactacagcctacggagtcggagcctacaggacccaagtcactaggagatctagtcggaccaactcgactacggtctcgtcggtattatcaagttctgttattccctttgtaatctgtggtttccatcatataatcccataccaactggattagaactattacctatcaaggggcctgaaccagtataatcctcgccttttgtttgttttatgtcgtattacgtaaattctcgttccaacggaccccaataccctctgtatccggtctacgggtatcccccatcgacactagtgacatcggcttttcacaattcccagaaagacaatttcgaagacccaaaaaatcaattgacattttattgaattgatcaatacatcagtgaaagtgttgctttgctacactcaatgaacaatgatcgattctacaaaggccggttgcccaaattaggcaacgaggattatactatctatcttatccatccatgtacagaggtgatcatttacagtgcagtgtgtatctaatactactacttaacctccacttttttccttttgttcatcatttgacatagatgtttgattatttccaagggtttcaggacaactggaagacatagatttgtcttgggaaaaaacagttgttgctccatgatgcctccgggaatccaattccattgctgtctctaacgagaatttggttgctgtggcaccgaccattaggttctcagatttattggaaaggcaatcaaattaaagatattgcaggtctaataaccaacacattccaataataaaggtaaaagcagaaaaaaaaatcactagagaattagaaatgctattttctagtaatatactgatatgtgaggactatacgaaaacgacaaaagaagatacaatcatggaaaattattaaccttatataattttcagatggagctattttataacaatatttctgcgtttcatcataaacatccatagtgatcaatgaaattttgaagtcaatgtccatatattctaactgtccaggaaagctttgcttattttttcaaagatttgatagtctttaaatttatcataatatttgatctcttatgccatggcaaagtatgtgtgaaattaacattttagcaaaccgaacacgatgtgctatctaggatcacaaattcacaataacagtgtaagcaagttgcactcaccgtttatatttccacgtgtgataagcacacgaagataatctcgcagccctgtcaatactattctttcttgatcagcatttagctcagaaatatcctgatcacgtgaaggcaccacaaatggacttctataatcctcatttccgaatgtagtatccatttcatcacacattagtgcttgtgttcctggtgatgcaggcctagaatctttaaaagagttagctagatggggctctgttccattaatgttctgacgatctatacaggccttgttttggatgtcctttagagaagcttccttcaagttttgctctttggtcttatcattgtttatttcatcatttgtctgatattgcttctctgcttgcatctccactttattgcctgcaaatatgagcaataatatttggatttgagcacaaaattacagtgaacctaatcacacacaacttacaaaataaggttttccttttacaagtggtatacaaaatttagtatgaggtacagttgcttatgagacaacaatcaccatatcaatgtcgaaagtcatgtccattcatgagtcatgagtgtgatagacgtatgccatacattccattttgtctctaataaagatatagtactatatataataagttttatacatcgacttctatttatcctgaagctcatagtgctggcacagccttgctccattttctgttgtacggaaattttacgctatctttttttttttttgcctctttatggccagttggatgtttgctttgatatgtgcatgtgcctgattttcgtctgcgttcttattcaagtagactggcgtagaagcaaaatgtagttcaaagcccacaacaattagcaaactatttgcaaatttttaggcgctatgtcctagaaaaatacaaaaatatatatatgaatttgtggttaaaaaaacaagttttatgtttttcttctattaacatgatgtattgatgtccatgatctgctataccaaaacaatgttttgatacagatgaaccactttgttggtcgagaatctggagctgccagtattcaaccaattaccatggaagcatggcttactgcatggttgagccaactattttttcacatgttacatggatatctttgctctgacaaaaataaccgatggaacatcttttttcatggttgatcagcttatttccatgaagcacttgatatacaaaagttcattcaatggtaggtagcatatgagaatatgaaaaaactagttggaatggaaaatgaacagtggctgtgaaaaggaaattgtgggatgttatttagtgtgataccaccaggttctggagatgctgcctgcactataaacgaaatcatgatctagttgcatgtgtttttctaaaatcacaaagtactagttttgtattcctataaaacagggtttcctgctttccaaaatgagattcacttaatcgaataactcttaagaaatgagtttccttatcctagtaaaaataaaagttttgggaaaataacttccaaagtacatataccaaattgtgttttatgaaatcaaatgatccaaacaatctaatagagtataacggcaaagtgtcatctaaatgtcatcgcacctcttaatactgatgcacacgttcacacggaacaaatgatttttcaaatttaggttgttttgaataatttagctataaaaaagaagacaggactctgtaccagcttttgtgaggaatgcttctggtgcctttctgcacgcaaccaacgcattcttgacaagatcattgacttcaataagagggatagtgtttgctagtggagacctgagaaaatattatatttcatcaaaagaagagacagtaagcggtagagtatacctcttatataacatattttagtataactaaatgatgctgccatataacctttgagataaacccatgaagactttcaaaaatattaaagtactaggctgagccatctgaaatggcactagttacaggaagctcatgacacactgaaactagattacacattggcatagtagaactatctaaaaggccagaagggacacttgtaacctatgttaactaaagaattaagaacctcaaaatggcttatctgagtacatagacctttttttttctgttcttgagttattccctttgagaaaatataaatatagttccgcttacctatagatcatttcagatgatttgctttggtaattgatagcaatatcccctccaaatcctgtgcaagaggatgcaagctgtgaaacatctgcatggtcagtctagcacataacagtaacaacaaattctagtccacaaaaacttgcagctggccataccaattagaacataccggttgaaattgtgcttctgacaaaatttgttctccaagggaattttcttgatatttcttcctacgcactggagaatttttgtatcctaaagatccagtggcaccattcagagcaaagttagctgcttcttgaatgtgatttctatcagatgcatttttcatttgaactaaagcttttcgctcttcgcttccttcaaaattcttacagtcctgacatctacagttcttagagcataggatgtttgcttggaagcattcacagtacttttttaagcactctgacttcctgcagtgacagcccttattgtgctttggtatcggaggtattgcttcagaattatcctgaaagtcacataagactgtataaacacatgtagctcaaggtaaaaaaaaaatggacttggcattttaatggggaaataacaaattattcctaaacattggagttagaatcatttttagtgtttaatttccagaatcctgctaaaagatgggacaagaggacattaaaaaaaatgaatggattaattagtactaatggaacattaagaattataaaacattacccacaaatccaagatcactttggtattttatattttacttaaaccatgtaaacaaatattttagtattgcagtgtaaatgaaatgaagagcataattacattgtgcctgcgtagaaatgtacattcaattcaaggacaaaataaagtgcgtgaattcaaaataaaaatgaaaaactataaaaagcagggaataatgtcaatatgacatgaaagctctggatgctgactgtattgagcaatcaggggtaggtgtatgagattatgcataaaaccataccagtaaaccacattgaaacttacattgcaaactcatttatcaaaataaaaatggaatagagggacactatcatggccatttttaagtccttgtcacaaccgaagcaagataatgaaaggtgtgtaccaaaaaaataaagcagagctgttggtgaatttgtttcatttcatctatataaaattcattcagctcatgcatgttttggaattatatttctggatttgatcaggataactactgaaggggaaaacgagcactggtttaaggttacaacatggtatagatgtagatagtatgtcatattaaagagttatattggcgaatagtagtacctttcgaacagttacagtatttggactattttcaattttgggctgaaatgcaagtggattacggaggagaattgtttcaatagcttccttccttatgttttcattctcaatcttgtttccacatggtgaacaatggcatccatcacaatatacacgtgctgcaaaacactcacaatacctaacaaacaaatatcaagctagtgagcttgttataagcataatgggcatgatggtgtttcatcatcataaagtcagctgacaacaaacatcagtacgttgcacttattgtttgctagcagtctgcctagggagaatgtgccttaaaaaaagcaatcaggaagaattgaatattataaaacacagagacgggacaattataattagaatagcagacaagtgcatcaaactcaaactgcaaaggaaataagattaccacaagagaaaaaggaaacattaatcccctactatgaacacaacgcaacagttatactcttatctttccactgactacacacactaatgtacatggcataccatttaggaagctatttaggtaccgttaatgatgttgtatgaaggaaaatcaaacgtaactcctaccggtattgaccatcataactgacctgtttcgagattcttaagatggtactaaacatttacctgagaatacatattgataatagttgcttggaagcctaccttttgcaaataacatgtaaaagttatccagtactctatttcaaaacactatattttcccttgctgtaaacatgacactgcatttacagttttacacccaaaagaaaaaagaagatactcacagcttcaaacatcgtgagtttttacagttacagtgtttccttttctttggactggcattttttacttcaacagctggcttcctgggaaaagtggagcactagacttggttagcaaaatgaacatatgcactagatcaatgcaaaagaaacacatacatttcttggaaaatattaatgaatttgatttcaacttggaagtgcatttactctatgaaaagttcaaggtaatttgttatcaattaactagttgatctacaattaacattatttcactacagttctgaaacgaaaataaatagacaatgaatcagttgtttaggataagttaagagcaaaagagcagaacggctaagaactctcttctgaaaggcaaaaaaggaagagcatccatgtattgtagtggagcaagatctagctctcagaaatagatttctttcaatcttgatcgcatatgtaagttaccattaggcattttgatagatttattcattaagcacatgaaacaatggagacacatgaaataacatggtctatgttaggtcttaaaatatccccaaattttcaacacgatgtatcgaacttcaccccagaaatgcttaggcatcaatcctcacttagggcaaagtgtgataacccattaccaatacaatcacatttgttttttcacaagcaccaacatgcttatgtgcatgcacatttatagacattggcatatagtcaccatatcagacactaatggtcgatctgagctcaactactcatttctaacattcttagataaaggaatgaacgccgggcaatcttaccaatgaaaatgacacggagttaggtaaatcttattagaaaaaaaaaagacagagttagcacatatgagtcgaacaactggctgcttacaataacattcgaatcatgagacttaaagattcaatgtaaccaacacgtttaaacagaacatatttcagcatcaccccattccttcggaaaaggacacacacaccacaagctacaagaattcaaagcacctaaactgatctcctataccaaaagtagaaacaaaccaacatgcaaaaccacaaaatcccaattccagagggagatttctcacggcggtggcggtggtggtggtgggtgcggtgtgaaggacatcggccacggcctcgacaccgggaccgccggcttcttctgctgcggcggcggcggaggcggaggaggagccactggtgcggacctaacgggcggcatggatggagcctcagctgaacaaatttcgttcgaaacaaagctgctgtttaagccaaaaaggagagaagctctcagatctaccggagaagctgagtttgaggcaggaagaggaaaggaatggtgaggaggaggatgcgcgtgcgcgcgctcaccggcgaggatgcggcgggcgaggacggcggcgccggtggctctcgcgtcgcggggaagcgggaggtggagacctgggcgctggtcgacgcgggcagagagagcaggagagtggaggccgaggggaagggggggaactagtaggtggcgaggaatcagaggcctattccggtgggctatttggtggtatgggccaactttagtgggccaaattattacgtgggcctaattcgtagactaaaataggtgggccaaatccacttgtgtggtaatacgtggaaataagtccacttccgccgcttaactttgcgtcgagtctatatgatatccctaatccctaatactagaaatcttttactgcccaagtgttcaaaactgtgtagtctgtgtaaagtaggtcccatggtaatatgcattggtagttttgctgatgtgacatcctagtcaacaaggagagaataaaaaaaaatatgtggggtccacatgtcagtggcatctccttcttcctcctctctccctcacttccccatttgttctccatgtctcctccatatcaatgggctgccaccgaccaccccatccacgtcgtcccctccccgtgccaacaaagccaccccctctttcgcgtcgccagttgtgcccctcaacaccccctcctacgcatgcatctaaccctatagccctcgtcagctagtggggaaaaatccccactgtcatccaggggagtggcttgctcggaaggagacaaggtcgccgtctatgatccagaactgctcagagcatccgaacgtagtacctgcatcgcaagagatctagaacatgacaaagtggtgatctagaacccggagctggcacttgacggtggactagtggagatgagcggcgagcgatagaagatggcaccaatgagctcttcaagcgcacgcgacatgcgttttgtcgggcacaatggcgtggaagcacgcaacacagatgcactcattgctagcacctaaccaggacttcacgaggcgggtagcacgattgacgcatacgatgaggttaccggtgaccttagggtcaagggtcccgttgtggctagtcttctcgatgtggaggaggttcttgttccaagtgatgacctcgtgcgacaagaggttggatggcttgttgaggtttatgacaccgtagcaaaggtgcttagcgatgggctgcttgagcggggagtggggtgtagtggccagtgcggacattgaggtgggaggagttgagggcatcgcgatgccgcggcagcctcggtgtgggtgatcaggaggagcaccggcatgaggcaatatgttgggtgcggcttggcaatgaaatctcctgtggctaggccacttacatgtgggccccacatgttatttgtattctctgcatgctgaccaggatgccatgttagcgaaaccacccatgctttacagccatgggatctactttgcatggttttgaacagttgaggggaagagattcccagtattgaggattaagaatgtcatacgtactcgtaaagttgagggatgacaggtggacttatttgttgatggaactatgttacgtggatttcactagtggaccgaattcttcgtcaagaattggtaagcgggctgattagctttaattgaacagagtgggccaaattcatgtacggattttctcacggctgttaagtggactgtattattagtgggcttactttttcgtgagaaactaaatgggctgaattctgctttaggccgagtttttttcatcggaagtaggagggatacatttgctcgtgagttggattttcgggccgaattaatttatccacataaactaaaaccgaattcgtttgttggtccaattcaaaaatccaaaagcagaatactccaaaacgaaaaaaataaaaataaaaatcaaacaggccattcaaaatgaggaaaacccacggggttgaccggcttgacccaaccaccgtatgtatagtcgggcgactcggaccaagtcgtcccgacgaccacccgacacccacacagctatgcggccccgccgcagagacgcctccgcctccgactccgacgacgccgacgcgcgctcctcctcccctcgcccgcgccgccgccccgaccccgcgccgccgcgcgcgcccctcctcagcagcctcgtggtcaagctgcagccgcgggggccggaggaggagcacggcgcggccgaccggctggagcgccggcgcgatcccccgcccgccgcacgccgccccccgcgggagccctcgcctccagggttcatgcgccgccgggagtcgcgccagacgccgccgccgcagcagccgcacgcggcgccgaggcgccgcggcggcagcgcgtcccctcctccccctcgccgccgcgggagccccctggggtttcggcctaggtatccccagccccgtgaggagccacaaggtatgaaaaaaaaatggaaaagaaaagaaaaaccctcttgttcttacccactcttctgttatcatttacttcgaggattgattggccggttggtacacctatcttttccttgttagtggcaatgatttcttccttgttgccttctggatttagactacatgctacagaaggattaaggatagttagttcttgatttgcaatagaacaaaaccgttgacttgctacggtcttgtaccattctgtgtttgatcgatcccgttgtagtagtactatagtatttctcaaggtaggtttcctggaaatctcatttgggagtttgattttgttgcatcagttgtgcgaacaagcatactgtgaagctggcacgccaagcattgcatgccaaatcctggctgaagttactgaaaataaaattgtagtatcctgagtatttcaattcataacaacgacccaaaaaaaaaactctagttctttttttctttttaacttgcgtgcagtaattaccaagtgtatgattacgaaatggcactataatgtccaaacgagatatttgagtagctttaatggaactcataaaataaaaatatatcattctatttattagagataacttgttccttgatgggtgtattgagtgagacaggagcaaagaatagatcaaaggaatatgatagagctaatcagggctgacacatatgatatatggagcttcttagaagaagtctacagaaaagatataaagcaaagcaaaagaaaagctaatggcaatctggtccaaacagcacaacaaagtttatatgctatatgccaagtatgaagtgctatgctgtatggactttattaggggtgtttttgaactcttgaaccaataactatctctgtgaaataaagctgaaatttatctaccgaaaacaaattttgcatagtagcttagaaaatatgaaaagacatacacagtttggactttgatattcatgttcccagagcatagcaagcacagtactgtggaatagacataattggatttctactttgatttttgtgctttactaccaatattacccgtgcgttgcaacggataaagacaattttaaaataactgaacaaaattatctcctagcgaggagagcgcgccatcgccagctaccccttctttcccagtgaggacaccgtcttctggttcccaaggtgaggataagctgtagctcctagctccctcgccctattgccaatgccgaccgccgccgcacagctcgccctacaggaagggcgcgcgacgtgctccagtggcttaggctgacaccacagggagagcggtgtggtccggtggtagatgacgtgacctgcttggatccgctcgctcgccgcccatggcttcctcggcggccgccatggcataggaagaggggagaggactcagaggagggtcgaggccaccccgccgcggctctgcctcgagcctcgaggctgtcctgccaccgctttgccttaggccgctatgtggggaaagtagagagaaaaaaagagagagaggagtctaagagaggagacgcgttagcaaaaaccaccctcaaaaccaccaagagtcattttgcactagttttaattttaatagttggagggtcaaaatatctggtattgcagttgagggatacaaattaggttgatcctatatttgagggagtcaaagtggacttattccatatccctgcatccttgccttgggcaggcaggcccacagcctgccatgcaacaagcagcaccagagtatgagcccattgggctctagcgaatagtttggattcaccgtgttgtaccgctgcctgatttccgtacgaatgacagaggaaaaataatccatgtcggtcatggtgacagaaaaaaattcacgaagacggacaaacgaaaaaaagaagaagttggaaacattttttttttttttgtaaataggtaaagataaagatttgtatagagcaactataaataaaaatttatcatagctacgtttaagcaaaggctgtttgcttcttcatgaggtaactactattatcctcagttatgttacatattccaccaagtttagttttttgtcacatgatcatgtagtgtaagtggtatgaacttttacatgtgtttttcctgtgcccaaagttactttgctatttgtcagaaactagaatgttgatatctaacacctgacactgctttgataagttgtgtgtattatctatatttttccatggcttccatggctggtgtaattactataatatactgtggcggtttatttttatatatcttgtatgtgataacatgtcaaggtggttttttttttctttctgacattagtatttacttattgaacatttattatttgatgggttcgtattctatttgctgcctttttctgctgagctgttctgtctatgctcagatgccacttctcacttggaaatgtctttaccgagtcatgcatttggcaagttatgagaagattggaggtgtaaacatgaaagaaaacgaaggatgagagatggacacttgacaatatttgaatggcttggtttgctatattttggttgttcaatgctaaatggttccaatgcaagtattctgttaggaatcactactctgggttgcctggtcatccaagttcttgtcaaaatagacagaattatgggatttgagctcttcacttcttatagctacttcctcatagataaggccttgattaccttatttatagaaataaactagggtgttttagttgcttaagaaagcatctgcccaaggaaaatgttgttgaaaatgaaggtatttggtattgcggacttggttataagtgaattggatattgagatgcctagttacctgggactgcttacactactacaaaacgattggcacacaagaaaaagatccatggaaacatggagaatggagatgttcagttcatctattgtccaaagatctctggtttatcttgtagtgcatggctaaaaataacatttgagattcgggggaaataatggtggaaggagtgcttggtaagttggaaaatagctcaggacaccacttgtttctggaatgtccgtctgtttcttcggattgtagaaattgaagggtggaactccttgcagaggattagatcatgctccaggaggcctaacctatatgatatgaattggataaagagatgaaccaggctttaggaacatgtgaattctgcaagactggcgagcccaaatgtgggttgctgcattgttgatattttaactactttataaaccagacaagagatcaggatcatatggtgctgagttcaccttcaattactgtgctgtttacttgacagaaattattttcagaggcttatttctgcaatgcattttttttctggtttgactcttgagggcctttgctgaaagcagttcaccttcaggagttgcagaactcatgcatgatgcaagtcctacttgctgactgttactccttgtggcttctaatgttcatgtagaatgtttgtcgctcgcctttcaggatatcacccgcactcaggttccatgatacctccacgtggccgcggagtagaaagcagcaatttcaatgacggttcacgttatggatatgagctggcaagtaaaggaggtgaaaggttacaatatgtttctcctcccaatggaagaggaagaccacacaggagggatggtggtgctcctggaaaagatttcatcttcattaatggagaatatgtgcacaggaatgacccaaacttgtctccaagagaaggtgactggatatgtcagaatcccacgtgagtatgctgaatgtatatttgtttcttctttcctttgttgaaatagattcttctgatggtcttgtaaatttattactcattattttttttatttcagttgcggaaatcttaattttgctcggcggtctcactgtaacaactgcaacaaggaacgctatgcacctgccatgtacaagtccagctacagtcctgacagacgccagttcaactctccaccacaagggccaccgagtagggttattggtccaccgagtggccgtgatctgccaagggagaaacaaaggtatagatcaccaccgcgtggttggggtatggtccgaccggatgatcatagggactattctacgcagttgtcccaagatcgtccaggacgaatggcagaccctatgcacagggacaggatcaacttcggggatgaacttccacaccgacagcgtgggaagtttgactgggatggctataatcaccgggagcatccacgcgatggaccatatcttgaccgaagagaaccacggttggggtctcccaggggtaactggggacaagctgtacgggacagaagtcattcacccatgcgtaacaagcccatgaacaggggactagacttacgggagagaagccgttcaccctttcgggacaggcccttgaacaaagcctccattggaagaggtggacctgaccgagactatgttcatccatttgacacccatgggcgacctcataatttgggcaatagccgtggccatggttacaggcaggaggatgatctgtttcctattcgcaatcaaggtgaccagcgtgtcctttcccgtcatcggaatggaatccactgaaatgtaatatctttcagctgggtacagattcttcgtgttgataggctatctggaaaagcgaatctaataaaaattatctcgatgcttgaggactcctgaagctttgtaataatgtttaatgttttgtactgtgtagttacttccttggttgggttgtttcagtggaagtttcaccattagaaatgtcttcatgaactgaatttaaagggcaatgctaggaatgaatattggagtggttaaagatgaacacaaccatactgtgctctgtatgttttattgtgtgaaatcttgaggtgtaaattttgtttattgcagccatgttttacataagctgctccaggcttcgtcagtcaggtaaaagcaattactcctatgttgtatgttccgtaaagcctgctagaatgctaccatggcattactagcactttcctgtgtctttggtaactgtttgatactcaattgtgcaaatatttgtgagtgcagggaataacaatacctgagcatttgccttcaaatttctaacacttttattggtaaaagcttgtgactatgtcattttgcatttctgtttctttctttgtactatctgtctataatctatactctttaaaacattctcaatggtagtatcactgacaactggggccaacaaatgtcggtggagggactgacaaatcaaccgacacaaggtcatcagatcgatcatcgatccccaatttcccacccccgacttttctcgttttatcgcctctccctatctctttcgcgcactcttgtcggttcctccgcaacagtaagctgccgccgccgtcgcctccctcgtaaaggaggcagagctctcgccgtttcctcatcccgtgtgccgcatctccgccactgctatgccgccccaagccaccgttggcaactcccccgcaaaggaggcagagctctcactgcttcctcatcccatgagaccgcatctcttggctgcctccaccgtgaatcgcagccaccacgcccccaacctctctccccacctagccgatctagtagcggcaacaccgcgccgatgatgccccccacgaaacgccgccaccctctagtacgcagccaacctcgtcggcggcggttgcgaacgcaagtgagactgcggcgaaggaggcagagcccacggaggttgcttcggtggagaccatggtgaaggagtccgagctggtgtaagcgtcagttgaggccgcgccgaaggagtctgagatggctctaacggaggtcgatcgtggtagaagcatctctgattgatactaaagaggcaaggtcagtcgctgcagaagttgagtcctactcttccatcccaggcaggtcaaaactcacttgttcaggtttggtgttcgaactttggcaacaaaattagtcggagtaaagagttatcaatccatgttgctacttgccacaaaattagttgggagtaaagagttgcctttactttatcaatctatgttgctacttgctagggacactggtcaaatatctcatgcgaagaactgaaaaaggtttcctgtatcatgtggttttatttgataagctttgcagattttatcttgaaaatatctgaaacctaaaacctaaagtttagagctaggtacattataaatacacgtgtcccacctccccccccccccccgccgcgaaatgatcagtgttgttgctggtgctgctgggatgccctagttaggctgcattctacattgtgaaagcaattatatttttccttgctggataaactaaaattgttgccttgctatgccttaaaaaattcatgcaatcatgctagcatagttatttagcacccggaaacagtttccctaactttatgcagtctgcagttgtgccattgatatgtgggccccactttagtatggcccacatgtcagtggtacaaagttagggaagtcttatccttagcacccagtgggaatttttttcacttgccatgaattcacgccattttagtttttagccacatcagaagcgatttagcatatcatcatttgtacactgatttgtagttgtgctgtacaatcctattacatgtatgacaaaaacagagccatttaggcatcgttcgtttaggggtgataaggggtgataaggggagattggctcttgttttctgcgcgcacgcttttcaaactactaaacggtgcgttttttgcaaaaaatttctatagaaaagttgctttaaaaaatcatattaatccatttttaaaatttaaaatagttaatactcaattaatcatgagctaatggctcacctcattttgcgtatcttcccaatctcctcaatccccttctcctcaaacactcccttagtctgttctatggcatccagtccatatgcttagtcttggtggcatctaatgagttttgctctattggtaattgacctatcaatttgaaacaagtaaaacttttgactatctagctgttggagcaaatgataatttttttgagtaaaatttcacaaaactacaggtattttgaccaaattattgtaaaactacatatttaagacagtctcataaaactacaaatttaacacgaggcttttcacaaaactactgatttaaagtaaaatatcacaaaactatagatttaatactagagttatcacaaaattatagattttatagtttaaatacttaccactaatgttatagagttttataaatgttgtaaatttgcacttaacatggtataaaacatatagttttgtgataattttaaaactaaatctgtagtttggtgattatccatcttaaatttgtagttctttgataaaattatttctaaatctgtagttttgtaatacaccttaaatttgtagttttgtgataattttgtaaagtatatgtagttttgtgaaatttactctaatttttttgaggaaaaacaaaatgatttaaactgcttgttattcttccttttttttttggataaagtgtcttttcccactgagcactcttatacgatcaattaacaagagcctgcttttattgtaatttttactcatgatatggaactgccctcacaaaaagttataaattatgaaaaaaaatgttagtgtttttttatatgatgatgcattagaaacctcaacagttaatcagtcatgattactaaagaataatacaaggaactgtagctgcacaatagaatagaattgttggatgtggactgacaaaatattggacaaacacagtagaattgttgactgcaacttgtggctaaataatacttgagtgcaagctacatcttgctagcttttggcacatctcgttgatatgctaatataaattcttacaccctgtgcttatatttctttcacccttcagtaaagccacgccctcctagcaaacattcttataatggtacatttgtttaataatggtacatttgcatgggtattgaatacatgttccacactcacggtggtggtaataaattgttttgaaaaagatacaatcctacaaattgtacccttacatcggtttaagttttggaacaggaagaaagctcaaatagtatcgacttaaaaccaggagttttctttttctaatgacatatatagttcaaaattaaaattttaaaattattcaatgaatttatttagcacgaaaatattttttgaagcggcttgctatgctagacttacaccaggacaaaggcaagcaaagctagatcctcaaagagcaacgtgacaaaatgcaacactgagtgagaggggaaaagaaagtgttcaccaaagagcttgtaggcaacgtatgacacatgatgagaggcaagacttaaatatatacctgtagaagatcagctaggcaaagtttatcgccaaatgagaggaaagcaccgctagattgatgaaatgcaagccatgcagctagacgggatacaccatgtcttgaatccatcgcgacgcaatacccaaattctagggcttcttccatggtaaaatccatcatcatcacgcaacctccatgatgcagagtccccaccacaatcatttgttatggatgaaggtaaaatttgttttctgattacttctagaaaaatataaaatagaataagcatgtaccttagggcctatttggcacagctccaactttaactccaggagaggtggagctggagctctgccaaatagtttcagctccaccgaaaatgagaacagagctgggtggagctctctcacaaaatgaactagagaggtggagctgggtttaggcagctccacaactccactccagaccagtggcggacgcaggattaaaataaagatggtgcgaagatgctcgtctcaataagaacaactaaacgcaaaaaataccatatttatgttgtaatcatataaacatatagtacaattaataaattaagacaaactaaaaacaaaaatgatattaaaataaagaaataatttttgcgccatacataattcatcatacataaaaagatactagtaaacatatcaatttacaaatatgagtcaattcataaagcatggttgatagatatcttctaaaaaataaatatatgagaagatatcgcatacctagaataagatgattattattttgcttagaagggagagagagaaaaacattaggcacctaactatagtaggggacgggggtgagcagtgtcgaggaattgactcaagaaagcatcatatacgcaagattaaaattggacactttagctgcttatttatgggccaattgtgaattggatgtggtggtaggcggcccaagaaggatatagagggttggggcggcgcgggccgtagctgggccggccgcccaacccctcctaatgggtggtaccgcccctactccagacccaactcctgtagctaaatttaggagttagagctctactaaacatgcccttactgtcacaagtggcagttacaatggaaattacccatgaagatggcatacatgatgagtgctgcatgtttactagtggagatatttttagcatagttctcattctttctatatcatgtagagcatagtggcgtacatcgagcagttagagtttaggtgttcgagtataccatcagtatcatgttgagatatttgctccgagcaggaagagactcaatttggttctgttggatgagtaggtaatgtccgtgtatatattttgagctttgatatgttacactgcaatgatatatgtagagcatttgactttatctattgtaaatagggtacaaagatggctgctattgtttatgataaccaagtggatcgtttacattccctacttcatgagggatgcacatattatgtgtcaaggatgtccatagagccagctaggatgattgtgcaccagtgatttgtagaccatgcttttgtgtgtgttttcacatgtatcactactattagtgagatatcaaacatgagcgagaagacattgcttattacctccgcttataccacttgatcaagttttttagtttactcagggccgaccctaggcataggccggttgtgcaaccgcctatggcccaggctagagggggcccacccccagcataggtgcgagtcctaagcgcacgccagggagagcgaggttgactcttgaagctgaactgttgaaggtgtgctaatcaatttgttcactatataccctatttactatatattttatgctttaatatgttacactgcaatgatatctgtatagcatttgactttatctattataaatagggtacaaagattgctgctattgtttatgataaccaagtggatcgtttacatcccctacttcgtgaggggtgcacatattatgtgtcaaggatgttcatagagccaactaggatgattgtgcatcagtggcttgcagaccatgcttttgtgtgttttcacatgtatcactactattagtgagatagcaaatatgagcgggaaggtattgctattattacctccgcttatgccacttgatcaagttttttagtttactcagggccggccctgggcctaggttggttgtgcaattgcgtagggcctaggccagagggcggtgtgctaatcaattagttcactatataccaattttcatcatttcaattcatggttattgttgtataatttactttgcaatttcactatttcagtttttgcaatgttacctacaaaacatttgtcgggtgctcacaaaacatttgtcaattatattatcgttattatttatcaagaataaattactatattgcaacttgcaaactgattgatttataatttatcatattagaaatatttacttgcgtcaatattaatatatgagtatatattagaagcactggcggagccgaggcccggctaggatgggcaagtgcccgggttcaagccatgcatcaaggcatagcacctgcttaattacccccaatctgctgattctattgcatgccccatgcaccagaccaccagtaaacaatagataattaagatgaatatttagtaattaattatcattcttaggaatcagcagagtcatatgcatgtagacaggacagtagcagcaacggtgtacagtaatattaatgaacatgcttaaccaaaactagcaaaccaaagtgacataactcttagtgccatcatttttttttctttgcatgataatacaagcactataatcttgtgtactgttttttctcaacctaaattagaacctgcctttactcgagtctatagtaagtgacatacggatttatacaaatatatatgggacaattgcttatttgaccctgttttgaactgtaattgccgatttggccctactttttgaactttgcttatttgaccctctttttcgagtacgaagcttccgtctgaccctcttttgatgactccattagggtttgattttttttaaaaaagaaaatgtttcaagagttcctaatgacgaaaataccctccaaaccctattttgactctctctctctctctcaatcgtgcgtgactctcacagtctcacctctctctcactcgtgcgtgcagcggcggcgacgacctacgcgtgcggcggcggctagctaagggggcggcggtggcggcgagctgaggggacggcggcggcggcgtcaagcactgccccgccggcgcccactcgttgtggtggagggcggcggcggcagcgctttgagggggtccgagtcggcgccgatctgagggggcggcggcaacaatctgtgggggcggcggcggcgagctgaggcggcggcagcggcgtgatgtacagccccgccggcgcccgctgtggaggtggagggcggtggcagtggcggcggcggctgcggcggtctgatggggcgcggggcggcgccgatttgtgggggcggcgacgccgagctgtgggggcggtggcgccgagctgtcgtggcggcgacggtgagctcgatgacgaggaagaggagcaacggtggtggagctcaggccgtggcggtgtgcaagcggtggatccggcggctgctgagtgtacgagccgcagatccggcggcggcggcgcctctctcccgcgagctggtgagcttcggcgccgcgccgtcaccactccacgcgcgccagcctcctcctttctccgcgcgcgtgatgccgccgcccgccctccgcacgccggcaagctccagcgccttcctccctccgtctgcgtgccggcttctgtcttcctccgcgcgcgcaccgccgccgggtcagcaacaacgacgacgacgacgccatggcgaagatcacagggagccgctccctccctccccgcgcgcgtcggcctcaatcttcttctgcgctcgccgccaccggtcggcaacgacgacgacgacgctgtggcgaagagcacagggcgccgctctctcccccccagcgcgcgccggcctccgtcttcctccgcgggtgcgccgccgccgccgccgccggggaaagagatttttttttatattatccaaactttaggtcaaacaagcaaacaaacaagatataacagggccaaataagcaagggcaaaatggactatttaccccaaaattaacaccgtcacctcacacaaacggaatagggtcagaccagagcttcgtactcgaaaatgagggtcaaataagcaaagttcaaaaagtagggtcaaatcggcaattacaattcaaaacgaggtcaaataagcaattgccccaatatatatgtacttttgttcattgttaggcttacccaggcttaaaaaaaattcctggatccgccactgattagaagtaataaaattagccttaacttgttaagagcccatagtatcaagttcgcctagggccctcgaaattgttgaaccggccctgactttacttaccataatgacatttatgttggtaagtagttcaattcaccacctaaacaatattaatttgtgacaaaatagaagttctattaacacacttttcatatgtggcagatgttattggaatggtcatgtttgtaagctctatagaggctacaaaaggaggatcccatgtaggaatgttcttatgattgatggcaggtgtgtacatattttggtttcaaatccccttacatttgttatcagagggctaaaatatctatattaatatactatctctgtttgtacagtggtaggatatagagtaattgatcagcttgtatagttagtatgacagtaataaattttcctttcctttggtgacacatgtaattagactataaggctatatttctgaactgccatcatctttttaactgggaagaacttttttaggctcggtattagaagcctctcataaatcatcaactatgcttgaccggtatcaacgatttcatgcataacactattgcattaactgtttgtggttgcaattatttgtaatgtatatattcaacttactaagttgttaacatgcatttataattctcatattgcatttgtcctatttatgtttatgcagcttcaaacttgtgaagttcgtcattaaaaggataaaaaatgcttactgaccatttaactaaatgggcgagatgttctcatgagcaacctatcattgtagcaattatgcttatagcaaagcgtgaacaaagtaagccaatgtgtccttattaattttgtgttaatcaatcttattgtcaacaaaattattttttttcgaggggacaggcagggagctcatacaattcactatagaagaagagagttgatccattttataagggaaaccggacccaaaaaccttacaacagcacggtttaattaaagaaaaaccgacaaaaaccccgacattgacaaactgaacctaagtagagtcgttcaacaagagataaactcctaaaacgaagccttcaaaaaggttatgccgacagaacggcgacatcgtccgatcctataacgaatctagttttcacccggaggaaactcttgaagtggagttgaacgagggctccagtagcaacgccttcaagaaggtgaacgacgcccaagggcgtcgccgttgctagcaccgagagcggagcaaggcttttgccttggagcacccatcaaccatagcatccatgacgggagccaccaaatgtcacctacacaccgagggtacctgcaatattcacaccatctgcacgacggctggattccaaaccaccccgtccccacccgagtgtgcgctggatctgagcaaggaagccagatccggccgcccccctcaccaccaacgccggccgacgcctagagggcgccggaggacgccagcggcaaccgcgggatgcctgcgtgctcacgccaccgccggccgccgcgccgccgccccaacgccgtcgccatcacccacaacaccacccggtgcacttacctcggccgccaccgtcgcccgtccctgccgccagcccatcccgccagatccggccgaaacggcgcggatctggcggtcaccgccgtcaccactccgggcggctccccaggccgcccgagcgcgaggagacgaggagcgccccgccgccgcccttgcggccgcgcggctttgccggcggccgctcgggcgacggcgaggcggagaaggggggtggggtggggggagaggggcggctcgacgacccggccgcccctggggagagcgacgcgagagtccttcattgtcaacaaaattattgaaaagctccaaaataatctcttactacataatcaacgatgcagttagatttgtagcatgttataattaatcacatatttaagaatatttcctagagctaagaacggtcattagcgctcttaaaccactcataattatatgtgtaataaaccgtgcaccaataaaaatcagttctatgaatatttcctagaactaagaatatttcctaaaactaataatagctttgaaacgcaaggattttacatgaatcttcacaagtcagttcgaccagttcctcaaaataaactctctaaagttcgtcgtcagtttcaaaggcggcttccgcttttttccgtcctcgtagcgtcacctacgccgcaagcacggaagacggcggcgagcggcggcgccgagcacgggtgcgcctcgccgacgtgcttgttcctctcgtggtcgcgctccgcctccatggtctccaggtcgacggagaagagccacgtctcatcttccgccggcgccagcgtcacgaacccgtcgccgccggcggtcacgatcctcgcagccggcgcctccgcggtgaagaacacctcctgacgccccggcagcccgcgggtggcttcggccagccggacgctcctctccaccgcccactccccgccgccgctctcgccgtagatctccaggtcctcgccggtcatgcggacgacgcgtatcccgccgccgtccacgccgccgatcacccggaggttggacttgtggtactcccaccgcatgtgcttcgggaactccatgaggaagaaggtgtccgtggcctcgtcgaacacctgcactagcccacccggtgcccaccagtagatcttcccggcggcgcggccgacgaactgggtgtcctcggggaactcgacgtcctcgccgtcgccgtacttcaagcccgtgtcgacgaagcgccagccgccgtcgttccccggcgagaagacgcacgccagctcgccgaacatgcagagcacccggtagttcgacatgccgacgccgcgctccccgccgccgccgtcgatcaggtaggcgccgcagaagaccaagctccacagaggcggcggcatgcgggcgatgccctgaaaccgacgcgtcagcggctcgcagacgaggaggtcggagaagcgccggtaatggcggtggccccagctggtcccccacggcccgttgacgaacagcaggaagtgataaaattgaattagaacatattaaattctaattaaatgaaatataaattttctgcaatatttgggtattttttaagtaggtaggtatataattaaattaatttataagtaaagtaagtgataaaattgaattagaacatattaaattctaattaaatgaaatataaattttctgcaatatttgggtattttttaagtaggtaggtatataattaaattaatttataagtaaagtaagtgtgagaaataaaatgttatggttggatttaatttttattaaattttctatatcattaattacactcattgaaattttcttggaatttacgtagtttaattgctaattttgataatacaaatatcattttagtatttatttaaataaaaattcttttatctctatgggcctttttcagcccactttcttcttcagcctaaaagcaaacaaagtctaatttatatccctatactcttcctctcacttgctggactgttcactgttggcccgcgtgccgcccaagtggtgcggcccaaatcctcgatcgatctcagccgtttattttgatggacggctcagatcattttgaaatccctaaccctaaccctccctctcccctccccctcgagccggccgcctccccctccctctccacccagccgagccggccgcctccccctcccccaacaccggctctccccctcccctcccctccggcggccccctccccctagctgagccggccgcctcacccacccctaacaccggctctccccctgccctcccctccggcgcccccctcccccgcccccgacgccgcctttcccgctcccctccggcggccccctcccccccaaccaagccggccgcctcccccgtccccgacgccgcctctccccctccccctctctccactggcaccgcttcctctcccctcccctccggtggcgccgctccctctccccctatccctcccgtcccaccggcacggcgcgggcgacgacggggtgcagcggcgacggtggaccgctccctctccctcccgtcggcacggcgcgggcgacggcgaggtgtggggtatggcgtgggcgacggcgacggcggggtgcggggtgcgggcggcgcggcgacggtcgggtgcggcggagacgacggagatggtcgtccctccctccccctctccctccctctccccgtcgccctctcaatggcggcgtcgacggcgtcggcttcgtccgagggtggatccgtcggcggtggcggccaccgcgggcggatccggcagcggcgctccctccgccgcctctcttctccctccggcggtggtggaggcgtcggcggcggccgatttttttttttttttgcaatttttttccatggctattgctaaccgaatcggatcgtgtatggatgaaaattagatgtgacgaccggaaaaatataaatatttatattagttatagatatatgtgggctgtgccagcccggcccagattgcaatagcgtcaccataacagcttgggaaatgttcttcgacatccctcacctatggaccgagttttattcgcgtcctcaaaccgcaaaacttagggcatgtacaatggtctttattagcgatctctctttattgttatgtaagcatatttggtgacgtggaagagagaggaagaaggaaagagaaagatggttgctacgcatgacaacggcatagagtcgactcttcgcatttattaggaaaatttttgttgcattgagtctaataaaggaaatatggctagtaagaaagtaatttggcacattaatggttagagaccgtattgtcttaactatcgtaacgtgatagcctctaattaacatagagaccataccggtctctacctttgtacttgcccttaaaaaggtacagctccctcaactgttaaaactagattaatttgcctccctaaatggttttgccctacatggtgcctacgtgacatttaacccggtcttttacgttgacctgtcatgtaagtggcacttaaatgacatttcagtcaaggaaaaaaagcgaaatttaaaaaggtaggacccatatatatctcaagagaaaaaaaaatcaatgtgtccacatcccatcctctcttgtcttttaggtcctgtttggtatagctccaactccctctatctcgacaaagagagagagagagataggcaaacgactgcggggagggatggggacagggcgctagctctgtcgcgcgtgacacaactgttgctaggctgatgttgccatcggcgcttagtcgaagaagggtaggaggcgtcggggtcacagtcgtcgatgggcctagtggacggaggatcaagatggtagcgtcatcgtccagaggaggtggaaggagcttgttgacctccccgctcctccctcatatgcaccccatctctttctgcggtgacctcctgttagtgtcattctttatcgtcgctagctccaactcgcccatcacaccgagatggactctgtcgccaagcttcttcccctcgcggccctgcctcacgcctccctctcccatggttgcaaggcttagggatcgcagtgcgtaggctgagaaagcaggaggaagctgcagatgaagaagcagcctaactcggtgatgggagtctcgtcactcgtctgatttggggccctgctgccctctatcaccaccggtggaatgcggggacgagcttcacacgacagggacgaagcgaagtgggatggggaatggggagcttgaccgccagtgatcgttacgtgcctcaaatgtccgtgaacaagaggtagtcgagggataaacaactgctgccactgttggagccatccgacgaaggcacggggatgaacggaggattgaccacatgtgatgtgaccatggctactacagatacaaccattgctcacatcatgaatgaacaagatgatatcaagatcaagtcctccaagtgctggaatccgattcggccacttgctacactgctgacttcaaacggctgccaaatttgcatacgagctccgttttgggcccgtgaatacttgatggaaaggtctcggagtcctctttccaacggatctagcctcatcgccaaactccatctcagttggccacaatcaaagaaacaaggtgttgcgtcacctgtcatgggcctatgggcatgtaacttcgtatgggaccccggcccaagtggggcccatgtgggatgcgccccaatcaggtagatcatgaccctagggtccctttggtcatcctcccaccattataattagctaggtacccctttagagttttttgggttttgtttagatgaaagtttagccattgctacttccttgcagcacgcgtgtcggctagaccgtccatctgcttgtattagaaaccccaacttatcgtgtgtattcattcctattttcaattcagattgcttttatcttgttcttgcttgtttcttcgatttgcttgcaggaataaggttgatctataccggcaagatcaacaacccacggagaggtgtatcgatcgctaaggcgcaacacaacaacgtctagtacggttgtagtcgggtcgtcaatgtttctcccaaatcgtagttatcatcaactcaccgaaagatcgggccaacaacagccttgagtgtctcaagtggagctcagggttcatcaagtggtatcagagctgggcccttgttaagggggtgggaatgatgaggacatcctccactattacccgctggcaaagatgcaaaagtcgggcggcgaccgtgtgagcttatgaataaccccaccctgcttagcttaggaggaggaagctaccttaaaagggagagccacccttcacttattggactggtctttttagggagattgggcctttcctcgagtgggtgtgcctaagaactgttggagtccggattaccttaatttgttgggcctcggtcaaccccacctaggccggattgttatcaacatgtgagtgtctttccagccagtcgaggatgtagtagtggccaaggacggcgggcggacaggcattagcgatgaggcagcagaagcgcgtgcaggcgaaggtgacgaggtgatgaagcggaggaggacgcactataggaggtcatcgatgtcggtaggagtatcttttggcttccatgctttttctccttgttctcaagccgccactaccgctctgcctttcttttgccatggcatggaaccctaagagcgttttgcttccttctaggtgaggatgtgcacaaagtcgtatgtgagaaaatttggaaacacgatttggaaacaaatagaaaacttgagaaaatttttttggtttaatgacgattcggaacgaatatttcccatgtcaaggagatggattctaatcactcgggtggacgtccacccgtttatttcatgtcaactaaatgattatgaaaaaaattgaaaaaatttgaaaagatagatcaatatgtaatacatcactccacaaacgtgcaagtccaaattcaacttctacaagttgtaacaaaaataacaaatttaactgcaaacatacgtatagtaatttgagttttgtttgttatttttgttataatttgtaaaagtcgaattttaacttgcatgtttgtggagtgaaatattaaatattaatatatcttgttatttttttcaaattttttcataactatttagatgacatacaacaaacgggtggacgtccacccgagtgattaaaacagtttccccccatgttaatccacaattatgggctccatacgatggctcatgatctcttttgtaaggccgcacgttatttgattagcaatggtctagtaggtgagaccgctcggaaattactctatccgttttatatggtaagttgtttgactttttattagttaaacttatttaagtttaataagtttgtagaaaaaatatataatattttcaatacaaaacaaacatattatcaaaatacatttaatttgaatttgatgaggtgtagtcgtattattaattttttctataaacttaactaacctaactaattttgcaaaaagaaaatcaaaatgacttatgatacgaaacggggattagtaatcatgcttctgtcatcaagtcaatcaccccactcatcattcggtcgcgtccgtgccgtcaataggggcccaccacctccaatgacaaaatccagacccttccccgacgtccgcgaaaaaacgtgagccgctcgaaaatcggaggagaaaacgaccgggcaccagaaccggccgacactctaacagtcgctgggacgtgggaccctgataccgtaggccccacatgtctgtagcacagagtaacactgtcgcgaggaggagcgtgctgcgtgcgggatccgttcaccgggggtgggcatcttcttcttcgttgcgattacgacccgcgccgacccaccaccaccaaaaggtcgggcgtggtggcggtggacccggggtgttagcgaacacgcgtcacggtggccgcagcgcgcgcacagcctaacctccacacgttgcgtactgggatttctggtttggagactttgcatgggcgtccactatctttgttgtattttcgcattctgcctcaaaggattaaatttggctggctatattaaaccagcccgaactcaaatcttttcccaactcaaatcctttccaaggaatttttttatatgtatacgagcttttcctaacttaaaacttttgtaaattaacttttttcaacaccatgattcatcgaatgtgttaacaaaagataatttggctaagaggaattggaatggtagtttgagatattgtttttatatgaaaaataaacaattttaccatcttttcctggattgtcatttttctagatttctttggagatcaattcaattctcatttggattatacacaccacatagtgtttcttatatgtttgggaattggctggtgagtgttaataaaaaaagttaagaaacttattcttgtagaggcttccgttataatgttgggctctttggcatagtagaatgatatgatttttgataaaacatcatcaaaatcttatttgcaggtacttttcagggcaatatattggtttcggggttagacccaactataaaggcataatgatgatatcaagataataaatgaagcattttgtaaacttgagtcgacgattatgcacctttttgtcaacttcagatggagattctcaaatagaattaagtaattaagggttcttttatcgtgtgttggtgtttcttagtctatgttttctttatattatgtcagtgtgtgctgagtttgttcatgtgtggactttgtaataattgattgtagctcgttgaattccggttattccattacctaaaaaacgattcatccaatgtgctaagacttttaaatactatgttcgataatactatgcaaatggataatactacctcctttttaaaatggatgattactttgatttttcaacacacgtttgaccatttgttttatataatgtaatactatcaagacgtatcacgcaccccaaatagaaccttggcacagtttcaaacaaatcgttgagcaaattgttattgtaggattatttacttgattctaaggataaattaaatagtttgataaataaacttaacaaataatataaaataagtggtttaagagaagagaactttttttctcaaagcatggagcaaataatccagtaaagaaaccaaaaacaaggtttgctgttcggtcgagatttttgcgatacgcggaatgatacatgttattagagaattataaattgagtattatttattacaaacctataaatattaatttgttttgtttctgaaaacttttatatagatttcttcttttataagcgtgtttacagaaaatgaggaagtagccgctgaagttgtctgaaaaaccctataccctcaagggctattgtgcaaaaccccgttctcttaaatgaagtgtaccaacaagctttgctccaagcaaaaaaggaaccaacagaagcaaaggtggcattcgttcgtcgcacgagagcaccacagcctcacgacacgagctcatcccccgccatctccgctccgctcctctcctctcctctccgtgctacgccaccaaacccactccccccgagatagagagagagagagagagagatccacagcctcacagcatcaaatcacctcccctttctcccagatccaagccgccgccaccaccccctcgccgtcgccgtcgccccctccggccgatctgatgcccgcgcacgcggcggtggtggtcaggtaactttgtaggccgcctcctcctcgattttttgatttttttttcttctcatgtgctaaccacgccacgccaccaccgctattaatacatccccgaggcgagtgtcgaggcatttaccaccagatcgatctcgccttccgctttcccaaatccctagactgacctcctcctgctgctgcttgcgttgcgttgcgttgcgttgtctctttctccgatcagcgccgatgcggtggaagcttaagtcgtcggcgtacaagcgcgtgccgtccagggacgccgccatggatctcgacgtcgagacgccaggtccgtgcacggttttttctctttttttttccctgcgatttttttttgggtggtgagattttgaggttttttttttctgtgctcggtggcggtttctgcagcgaaaatggcggacggcggggccccgtcgtggcgcatgtcgctgccgcacgtgtgcgtcgccacgctcacctccttcctcttcggctaccactccgggtgcgtgccatccattttctcatttcttcttctggttgtggttgttttcccaactcacggtgtggagcgcgtgcgtgtgattggttggtttggtgcagggtcgtgaacgagccgctcgagagcatctccaccgacctcggcttcgccgggaacaccctcgccgaaggtaagtaagcagccacgattcgggtgaaatttgatgttattgggcatgggagcaattgggtgtcctgtgtttcaggccttgtggtgagcatctgcctgggtggtgcgtttgttgggtgcctgttcagtggatccatcgctgacggaatcggcaggcgtcgcgcgtttcagctcagtgcgctgcccatgatcatcggcgctgccgtaaggtaattcgtggtgtcccacttctgttgacggctacttcctctcaatccttagtccatgcgtggtaatttgtggtgtcacacttctgttgatggctacttcctctgaatccttagtccatgtgtggtaatccatggcatcacacttctgttgatggtcacttccactaaatcctagtccatgtgcagtttggtcagtttggaatgtatttaattgccacttgctagcatttcttattttctagctggagttgttggtttcttggtgttaaacaaataaggtcagtggccactggtagcctggtttcttgttggtattgtatactttatttggaaagttgaatgttgggaacaacaaacttactctttcttatgtatcatattgatatattggtggtgtgacaagtagtagcttgatggattcgtccttccatgggattttgaatctccgagttatgtaggagatgaataaaatgtgtggtcctcttaacacagtgcagagagtagtatattgagaatactaggtttgccatcccgccattaggtaaatttatatggtttcttcgactgactgtggagctagtgtaacttcacatgcaaacatgaaagcaatcgaactttacgataaattgactttcactagccacaatagactgaagagtactgaaaattaattacacgcatcttctagaaaaccatggctcaatagtaaatattcttttcttaattgcgctcatgatgtacttagattgattatccttaaaaagggaaaagttctagcctttcaataattcaacactcttattaattgatagctagtgtacgttttggatatagcataccaagtcacttatgggtgttaagtcttggtttatttattggtgctgtagagttgctgataagttgaataataacaacataaaccatatgtgctctgattaccttgaggtgcttttacattgccattgctacatggcatccacaaactaaagttcacttaagtgcattgaatgataatatttaagatgctaacctttttttgaatctttagcacttttatcttctgcatgttatttaataggatccgttttggtagttgcaccaagactgttatttccgaaaatgcaattgtgtaatacttacatctatgagcacctaatacttgagagctgccggaaggaactatgcctgaacttagttattcctatgattctgtttcattgaaccttcctgaagaagaaacattttgcagcgctctcaccaatagtctggagggtatgcttcttggaagatttttggttggaacagggatgggattaggtccaccagtagcttcactgtacataacagaggtatgtaattggtgttatgcacctatgcctcaatctctgattgtctgtatcaaatattaatcttattcatttgtacctttttcttataatcccttggatccaggtttctcctccttcagtgaggggcacatatgggagctttgttcagattgcaacctgccttggaatcgtagtatctctcctaattggtacacctgtgaaggatattgatagatggttagatgctttcttctgtagctctctacatgttttgtgtagttagtaaatctgatgcatctaactttatcctttgctattaacaggtggagggtgtgtttctgggttgcagctgttccagcaactttacaagctcttggaatggagttctgtgctgagagcccccagtggctgtataaggtgtgtttatcttgggggaagctgcttattttctatctatgatcttccaacttaaatcacccttcaggtgtctgattctctataattgtgcttcggcaaatttgatcttaagtgcctttgctagtcgtaaaatgagatactcatatttgaggaccatcttggagtcactttgtcggaaacgacatttgatctcttaaactatatgcaaataccacatgctgatttttccatgaatgtttgaaggtcactgtcgtattaaatcaaacaattaatctgttggttagaacttgcaatctaccatcatcctgaggttttttgtgcttacaattaataatgggttgacacaaacttattgcctattgttacttagatggtaacacgaatgatatctatagaagagtagtccattggcacatattggtatttgcttcagaaagcacacattagattttcggataaatatcgttgatctttagtttcctcaatactgtgcctgttttctgattgtgcaccatgcaaatacagctctgatatgagcaaaacattttattagttttttttctgagaaaaccaattctcaacacagacttatacaactcccatacttctttatattggcaatttgtattgacatatttatatttaacttgtagcacatacattgaaaattattgacgagtcttatcttttattcagtgtggaagaacgactgaagcagagatacaatttgaaaaacttctaggtcctcttcatgttaagtctgctatggcagaactctcccgatctgaaagaggcgatgatggagaaaatgtgaagtattcggaattgttttatggtcgcaactttaatggtacaagctgttatgtgttttccattctgttgtgtatttgcgctaaactataaccttatttatgtttggccttgaagtttgttcattacaagtccctttttgctacagttgtttttattggcacaacgctctttgctttacaacagttatccggcataaattctgtgttctatttctcatcaactgtgttcagaagtgtgggtgtgccccctaaccttgcgaacatatgcatggggatagcaaatttatcaggtgggctcattggagcatcttctctttttttctgttgttctactgttctgttatattgatggttgatggattttgtttgatgtgtttgcttccaggctcaattgtagctatgcttctaatggacaaactaggaaggaaagtacttctttcagggagcttccttggcatggtaagctatcactgtgattggaacttggaagataatgttgaacattactcactgcacatctttactgctataggcctttgcaatgggacttcaggctgttggagcaaatcgtcaccaccttggttctgcaagcgtatatctttcagttggtggcatgctattgtaagttttagaattttatgtcttccgttactttgattctactatctttcaagttatctgaatttagttattaatgtctaggaggctaaactaaatagctgtgactactagttgaataccttaagcaggaggttttatgctcctattggttaagccaatttatgctacatttttgtgccaaatgtgccaatatcaggcttaaaaatatgcaaaattctctacttattgtatctacaaataggattttttttatggtgctctaaatttgttcagaccatccatttcacatcaacccaaaggatatcatttctcttatacctcattagaggtaatagattataagaaggatggaaacaaattattcaacctgatacaaaacattgttgcgtataaattcttccaagaacttgttcaggcaaccttttggttgcatatggtggaacaattctgtgtcaatatatcgatctgacatgtaaatggcactggggatatcagttgcatacatgatattgttctgctttgcagttgtttcattttgattcccctgacttcaccctcagcgttgttgtgcatccttagttattctttatatgaacaatagggctttccatttggtttaatttgtaactagttaaattatgagacagtttacctttatgctgctcttagcagaactctttaattgttcctgacaattatactttactggctcattaagtacaaatgttatggtaagtctaccagtttcttatagttgagtgcttctttttcaggtttgtcttgacattttcgttaggagcaggtccagtgccaggacttcttttgcctgagattttcccaaacaaaatacgggccaaggctatggctctgtgcatgtccgtgcattgggtaaggagttatgtttccatcacaaaaaaaaaaagacactgcatgtctgtgcattggataggagttcatttttcatcctcaaaaaatagacactgcatgtcaaaatgctggcagttagatcaaacagtgaaattcaacgtggaaatttcgttgctgattttcactttttggtttaatatgttaatatttggtattatgtgtctatgcatgtttcctgttccattaggatgtttaaaaatatgttactgctagtatgtaaccatagctgttcacattgttcaatgataaaaggagcctagtgctaaatacctggtgaagaatttgagctgttgtttagtcaggctgagctagaacaggtatattagatcaattcaaaatattcaagctgctaagtcctcaatagcatttccacactgttttaccaaccctggttatggtaatgaagatcagaatttcagaagtatatttgactctgtaagctgcagctttctctgtgtaacaaaatcgtttcccccaatcgccataagataaaaggtactgtatgctgttaataataaatgaataatggggccagatttttaaattagataataaaaaacttagacatttcgatatggttgattatgtaatggtaaatgataagtgtagggttgcaacaataatttggtagggcgcactatttacttgccatggttcattgtagttctaccatgattcgtatcgacgtcttgacatgctatgcttaaatgctgcaggtggtaaatttttttgtcagtttgttgttcttgcggcttctggagcaacttggtccacaagttctgtacacaatgttttcctcagcttgtgtggtagcagcaatatttgtgcggcgccatgtggttgaaacaaagggaaagactttgcaagagatagaagtttcgcttctacaaacacaataaaggtgctaatcttattctgaatctgacaacacaatttggatctgttaatctgtcttatctaatcttgtctttaacgtggcaattttttatttaaaggtggtttgcgagttgcgatgcacatttgaaactcacaagatgaactgcctggatttttagttgatatttcatatggccatgttgatagcaagcttggttttggaacttgatgatttaccatgtggtattcaggattaacaagcagcaatactctttcattgcagatttcatcagcgagtttgaggcaacaacaacctacatgattagcatctgacactatacttgttgctgaatacctgctgggaaagtctaccgtgaaagttgatcactgaaccaagccaacataccacggacaggcagcgccctacactggaccagggaagtacccagacatgcacctgtgaccagtaagggcgacctagctcgtgcataaaccatccatgtagtgaggttgcatctgtatagttggtcttctgctagatgtatctggtaatctgtgttgtcttcatcatttgtcatttgtacactgtcagtatggagaaaaaaagacgggaagtgtggttactgatggccatagtttgaaccgtggatacgttttttttactgtttaaagaggaataacagcactggctctgccagctacatgaaaataaagtgcgttctgcctgagctaatttattttgcatgtcttaaagagaatttctgttcagaagaggttggttctttttctgtagcttctgaaattcaaccgtatccgtacttttattgtgttaatcccttggggcatccacaatatgaaaatagaggaagtcttaagccccctaagcagtccatatacatgtgggagtgatccctataggttcttttggatgagctacccttatagctaatacctagtcataaggattaaaaaaaccattgcttatacctagtcataagttttaaaaaaactattggtcatctctcctctggaacacttctctttttgttgcttgccgccatggaaaaggaggtcacctgcgagccgttgcactcaggctgtggctgtcgctgccgcgacctcctcccgtgagctgccgcgaccaggccaccgtcgtcgttgctgcagcctcctggaattagtgctagtaacttgaacaccactggaattactcttacctggaaccgttaattccttctgttaccacattattgccaggaagaggattgataacattttctgtttcctgatgggaattgataactgtcgtagcagtgagatgggtaagacaagcatgttagttcaagccagaacttttgcacttaaattatttgtcactgagcaatgaagaaatgtgtgctcaccactactgaatgatctagaatgccagatttagattagcttcattttctatcaggatgtggacagcagttccagttgaatttatgcccaaatttctcgtactcctggcagcgatagatcaccaaaacgacagatttgcgatagatcaccaaaacgacagattttggggcatcagattgtagccaaaataaaacccacgataattttgcagtaatcctaatcccttccatcttacccttctttcttctatcccaccatgacaccatccataattgtaggtgctagttttagccataggccctatttaattcagcttaggattattataatctatattattaatagtaagttaaaacaaacatatagtttattatgatagattattacaatctataagccagattactataatctagtaatccactctaaaggtgcttttttagattattgggtggctaacaactaataaaccactaataatccagagaaacaaacatctaacaacttattctacgttggtttattataattcagcttatattaatctggctcaataatctaaattgcatcttagggcctgtttggggagcttaaaattctgagaagtagctgattggtggccagcttccaagaatctggaaaagctgggtttcccagcttctgccttctagttcattttttagattctatacctacagcttcttaaaatctgaaccaaaagctggactgtttaagagagcttctgattctgggagaaactcccccaaataggcccttaagccaaaacaaacgtggccttagacttgtaacttagctttcctttcctttcctgggggaaaagtacaccgaaggtccctcaacttgtcatcgagttacaaaatcgtccctcaaccacaaaaccagataccgggagcccctcaactaacaaaaccgttcacttgaggtctttcggtggttttgactccggttttgtcctacgtggcggctgagttagcgtgggacctatgtgggtcccgcatgtcagcgtggccacgtcaacacctctctttcctctcttctatcccttctctctctcacttctctggccggtgcccggtggtgggcgtcaggggagcaagcgaatcggcggcgttgtcgggggagcgcagtggcggagcggcggcgtcagtgagcgatcctcgcgctccccgtcgcgatggtgacgcgctcttcttcgcgcgcgtgacgggctgatggcggcctcaacgacggcgttgtcctcccagcagaggaggtggacgtggaggtcggtggcggcgaagaagagctcgagctgggggctctcaagctccgcggcggcggaggcgccggtggacagcgtggagagcgcggaggcggcgtcccatctacggcgagcgcggaggtgagctgcgtctggaagttgcaggtccagaggagggccgggccacgggcgaggaggcccgacgtggaggcggaggcgaggagccccagcccgagggagtgggcgaggagagccggcggcgctcgccacggaggctctcctgcgcgatgcggccggtgagcgcgtcgacccgccgccgcccttcctgacggcaggcacgacaggagcccgccgccgcccttccgactccgcggtgttggttttgcggtgcggtgcgtgttggtcgcgggctttatataggggcgtgtttggttggctcacctccgggctgaacttggcgagtgcgttcatggcagcggctcccccgccggccgccgcccacgaggcccacgaggcggcggcgggggaggggcggcgcgtggtggcgccgggatcgggatcgacctccgcgccacgctgcggtcggggggcaacctcctcttcgagctctttgtggcggccgtcctcgccttcaccctcctcatcgtggtccacagccccaacgacccgctgctccaactcctctgatgccgccgttgcggaggttaccgacggcggcggcggtcgccgggaacgggatggtagcggtgccctcgtcaacgatgacgtcgacgctctcggtgactcggcctaacaccacgcgctgagaaaagttagagagagagagagaggaggaagggagaggagggggaaagagagagtgtgatacgtggcatcctgacaggtgaggcccacgttgactcagccgtcacatcggacaaaaccggagtaaacggttttgttagttgagggacacctgttatctggttttgtggttgggggatgattttgtaactcgatgacaagttgagggaccttcggtgtactttttccttccaggggcggttcctatggaatttggcccacgaagacccccaccggggcggcccaacaaaaaaaaaagcccagttgaggggttaggttagggacgcaggaaggcaggaaagagaggcgcacgcgtcgcgccgtcgtctccccgctcctgtcgtccggcgccggcggccatcgacgcagcagaggccgcagccatcgaccgcccggggccgccattctccccgccccgcgtcgggtcccctcggctcctcgccctccctgctctcctcctctcggccctcgccatctccctcttcggctctccgtgacgaccgagaccggcgagccccccctggcttggctggctctccccctttcagcctttccagctctccttctgcccgggcaaagtgcaacggtgagttgtactcatttcttgctcaccttgagtagtctttagtctttattttcaatagatcggtgaatggaaaacttaaaattgattcctgctgcccggccttttgtcattgttagattcatttatttatatagtgtaattctagaatgcaagttcatctgtctaattactactttaaagtcatatgctgatatactttagattagagaaaactgaaacttattattttttttttggcaacgactcagtgagtagtcaatacagtagtgctagtggaaaattgttgtttgtctcgttaatttgtagtgtaacttgcagtgagatattgtaatgaatttcatgtctatgaagacccggagagtagaaaagtagtgtaacattgtgataatttggagtatcaagtaggaccacccaatgaatcgttcctagagccaccactgggtatatgtgattccaaaatcattaaatatttattttaagagttcaatttattcaaagccacaatttgctgtgtagctaggtactttaactgttttgcagtcagtgttcagttcataaccacatttctactgcaacaatctttcttgttatttgctgtatgacacatatatcgcagtcacaatttttttgttcacaactataacagagagatgaacgcttggcctttcttgttcaacttttttcactctcctttaatgcactcggcagtgctcctgcccttcctttttcttagagaaagaaataaaggcttggttgtttgtgaaaaccttagtaagctcaacctgccaatgcggatgagttgtagatttctcattgttgtatatcataggcacaaagtttaggtttggcccatgttgcccatgtctcatgtatatatttaccatattgcttaatgctatgaaatgagatgcattgttctgataattttttctccattttctccacctcttagctcacctggcaataaatgcacaagcatcttgctagcttcccactctgtacacctttacttggaatctgatgtacttagcatctattgaaaggtcacgagagagataccaggtcagggtttatcttaaaagactgatacttaatacatgtagcagtgctgccagtattaattgtccatgctcttaacttaaagatgtgaatatccaatggggtacagggctttgttccacctgattcaaggctttgttcaagcttggaagagtaaatgagctgagtaaaacaacattgtgtagcttacttagcctgaatttcttttactctggtctggcagaccagattggtcatgcaaagaccacaagttgggcctttcaaaatagtaaataatgataattattgcttgtcatcgactcatattgccgtacagctttgttctttagaccaattactaagtgataactttcattttctttcttcaggttcttatatacagctaattggctatcatacggagcacattgtcttttgtcatggccactgaagaggatgtgaagcaacgacaaattattgaaagccgtgcaagaaatattagccacaatgtccgatgcaccgagtgcggcagccagtccattgaagattcacaagctgacattgcaattctgcttaggaaggtacaggttccttctgtactatgtaactctgtatgcctttggttcctgaccttgtttcgtttgaaaaacttttggtagtgaaatattattgcaattcattcttaggtcaatggaacttgattgtctgtcgttaagaatttctttgtggctttttgcagctaattcgtgatgaaatcaaatctggaaagagtgataaggagatatacaaaaaactacaagctgactatggagaaacaattctatatacccctaaatttgatcttcaaactgctgccatatggttatcaccggtaagccttaattagaatttcgttttaatttattctcctgtaacttactttctttaaataaaagcagctttagttgaatgcaataacatatgcacttgtttggcatatgatccgttttcttatgaattgcttgttagtcatgatggacctaagcatttttcatcattgcaactctttcagcaagatgttttagcttgagtagaaactttactgctgaagcttcccttttaaaatgtttacatatttggtgatactcagctatggaaacacaatattttaatttacaaataaaataatccatcatttcttattccaatgatatcctgttttatctcaagttaatctctctacgtcgatagcaagatttactaaaagcatcgtcttctttttcttgctaataaaaatatccttttattcttgagaacttgatagaatgaatcaaatgactccagtaattaatgaatcaaatgactccagtaattattcacctcattctgctatctgttgaatttgatcttgatatgttctctaacaacacaaacaaagcttttccttcatcaactgggattttagaggaagctgttcaacacctgatctagtaaaattctgagcaggtgatcgtgggtggcgtagcagctggtgtctgggcttaccaaaagcacaggcagaggactaacgttcacatcatggctctgaatcttgtccggggggttccactgacaccaagggagaaggagaccatgcttgacgtacttacaccaccacctcctgccaacaagtggtggtggccaggcaaatgatttttcatgtgcttaatgaacacgaagaactctcctgtcctatttactggtggcttcacaaacttgataaggaattcaggattgctaattttagggcacattctttctgaatgtcacacttatcaacctaagatcgcgtattttgtagtgttgtataggcagcttctgtcagtatggtaaacaacagtgtgctactcagaactctgtactgcattcagcagtgtttctgactgaactctgttttgtctttcatcagaagctcatgtctgctgataagctgacaataagaaaaccccgttatgtaagaacaaacccaacttgtctgaaaataatactcatcccgtgtaataatatagggggggtttggatagggctaaaaagttttagtccctgccacatcggatgattggacactaattagaagtattaaacatggattaatgacaaaacctattccataactctggacttattcgcgagacggatctatggagcctaattaatccatgattagcctatgtgatgctacagtaaacatgtgctaattatgtattaattaggcttaaaaaatttgtctcgcagattagctctcatttatgcaattagttttataaatagtctaatactctaaattagtgtccaaacatccgatgtgacagggacaaagtttagcaaccaggttaagatgaaacatttaatatcgtaatgtcacatcctgtcatagattgctataagtataatggcacagtgttctaacttctaagattatttcttgccattatatcattacatctgcctagattatttgattatttgtggtgtacaatgcatgcgcctttttgtatttttgtggaacatctgaacacatgttctactctatacaattcagtgatctacagttttacactaccactggctctggctgcttccattgacgagctggatgccccagctgacgtcctcgcagcgccgcacgtacggcaccaccttgccaatgtcgtcgtagttccgcctcgccgcgcactcgtagtacgacggcgagtggaagcacggctccggcgtcgccacccgcgcgcacggcgggtccggcaccgccgtggccgcctccttctcccaccacggccgccgcggcatgatccacggccgcaaccccgcgagcccctgcgcgacgtagccgaaggtggagaagccggtggtgagcagcgcgtcgcaggtgctgagcaggtacatctcgctcagcgccctcatgtcgtgcgccgtgtcgcccatccgctgcaacccctcgtggctcggctggtgcacgccaccgccgccgccaccgagctcgtcgcggatcttctcgtagtaccacgagctcagcgacgtcacgagcacggcctggtccgacgacgacgtgttccctgcggccgggaggaggttctccctgcgtgcgcaggagaggacctggtcgagcaccacctgcgacaccggcggcgtctcctcgtggtacacgcggatctgtatgccgacgaggtggccggcgccggcgaggtggtcgcggtggtaggccgtgatggcgtgccagacggcgttggccgggtggaggaggtagcggctgaggtggtggaacacggcgtccttctccgggaacatccgctcgagctcgccacggagcgacggcacgaggaagagccccgggacgaggtagctgtccgtcttcatcagcagccacggcacgccgcggaggaggcgctgctgctcgtcgcagtagaacagcttgtcgtggtagtcggcgccgccgtcgaggtggaggtacacgtacggcggcggcggccggcccgaccacgacgacgacgtgctgccgttcacgccggcggcgacggagacgatgccgttgctcttcagcaaggctcccaggctctccttggacttaccgtcgaggtcccggaggtgcaggagcgggaaccgccgaccgccgtcggggagcagccacgtcgtccccgggaagggctcgcagaagagggcggcgacgtcgccgttgtacggcgcgacgaggagcgcgcgctcggtgaggacggcgtagaggaaggcggagacgatggcgatgatgcggttgcctagcccgcggttgtagctgatggagacgaggtagcggcagtcgtcgtcgccatcagcggcggcggcgccatcgccggacttgagctgccggagcgccttgtcgtacggcgccgtgccggggccgcagcgcttctggagcgcttcgtggctgcggagcttggcgacgaggtagggggaaggcttgtgcggcggcttcctcttgtggtagccggcgaactcgtaccggctccggcatgactgcgggctgaatgcggcggtgaggaggccgccgaggagctgatcgtcggtgaggttcgccgaagttgcgccctctgaacctgatcaatcacaaaaatgtctcaacatatgcccctcaaacttttttttagcttgatcaagtttattgataaatcagtggggattgttagtactgctactactgggtgcagtaccgcagaagatccatataaaaaaaacatagcaacattttataagaaaaatacatatatgataagaatatattcaatgttaaatttaataaaattaatttggtgttataattatcactatgttttttcttctaagaacatgttcaaaaccaaaacgtcttattatataaaagagagcggtattaggaaaatatgaggtaaaaataggttttcaattatggttcatatatgacgtgagaaaagcacatagcatatagcccccctcccccctcctctccccctatgaaagtgagtgagtaaatcttatacatcttataatttttggaccaatacattgctttactttaagattcgtttagactcccataatcctaaatccctccctcttatctttgcttctccatttcaatggtaccaagtgctccctcgccacttgttttgccaccacccccagcgccaccacctggcctcgtcgttggttggccgaaaggctcgaacggcaccggcgagccccctctcccccacagctggtcttctctccctcccctcgatccctgctttcctcctcctcaagtcaatggcggcaaggtgcccctgccctgtcatcttcttcaactccggcggctcccgccgcttcgatttgctccttgtcaccaacgccggtccactgtcctttcgtcacccccacggcttcggcgcctcaccgccaagccatatccactgtccactgtcgggtcgtcatctcccacggtcttccctctaagtccgacgctctccccaccctgtcatacccccatcccaacccggaacactaaacctaattccgttgtctttgtcgggtcgccacgagctagagaagaaagtgttgttagagctggaggaaaagtgttgggatcatcggagcaagctagaatcgtgaaacaaatcacgagatgataaatctgcataattttaaccccaataatcagtcgaatgccattacttagccattccattaatttaattcgtcactgaacatatgtgggactcttgtgtggtatattgtgcacaaactgtgtacggcaacaactggtgtctatgacgcggtccaggcgcgcgcgcgcgtggcccagacgcgcgaacagccgtaggccatatatccgcgcgcggttttgcgcacatagctagctaggctgggacgttggtgcgcgagcgagcgatgatgcagctgtagctaaggccccttttagttccccaaaattttttcctaaaaacatcaaatcgaatctttgaacatatgcatgaagcattaaatatagataaatgaaaaaactaattgcacagttaagggagaaatcgtgaaacgaatcttttgagtctaattagtccataattagctataagtgctacagtaactcacatatgctaatgatggattaattaggctcaaaagattcgtctcgtggtttccaggcaagttctgaaattagtttttttattcgtgtcccaaaaacccttccgacatccggtcaaacatccgatgtgacaccaaaaaattttcttttctcgaactaaacatgcagtaagctagctctatacctcgcgtcgacgtcgtcatgtccatgtacgcgcgtgcgctcgtccacgttccatcgtgcatatatgcaccttgcttgcatcacttattaggtagtgctacctccactccataatactagtaattgatatgatcgatcggccgaccggcaggcacatgtgtgtatacactttggagacttttcctatacgtacgatagttttgacgtgcatgtatattttttatatatactagtatttatacatgtgtgaatggaattgacatgggagataataataagctagtgtatatatctatttagttaacaaattactgtgctagaaattttgatgttgatttttttcaggctctttcaaagtaagtgtccaattcaactatatactctctctatactaaaatataaaagggacaaccgattttttttatgttttacaatatattgggcaaacatgaatgcatctaagcatgcaattaattaaatagcatattcctctcttttttagttcgtttttttaaatactcttcatcctcgaaatttctaattctattggtacgtatttattagagtgacacaaataagaaggtgataataattcttttttgatctttgtgctagtggtagttgcgtcttatattttatgaaggagggggtatgacttttgatgctgataaaagatcaatcagatatggtatgtataagtgttgaaaaaaaattatcggtacaaaatatattgcaagaaaaaaatgtgcaccttttttcacgaaagatatatagatatttaccggtacatgaaataaaatgtgtgcaccgtgattttaatatgtttctctaagtggattaattattttaccaaattctgaaagaaaaaagaagtcttgtgagttcaataaaaatcccttgaattggctgtacatgagctggccataggacaaatgttaaataattttccacacgcaataattcacatagaagaaacgtcgtggatgaaacaagaaaaggacgagaagaaatgcaccatataagagaaaaaacccacacagccggccatacatacatacatacatacatacatatatacatacatatatatatatatatatatacatacatatatacatacatatatacatacatacatacatacatatatatatatacatatatatacatacatatatatatacatacatacatatacatacatatacatacatatatatatatacatatatatatacatacatatatatacatatatatatacatatatatatacatacatatatatatacatatatatatacatacatatatatatacatatatatatatatacatatatatatatatatatatacatatacacacacacacacacacacacacacacacacacacacacacacacgagtaattgaaagctaaatttttgtgtgatgattttcgacatcatatttttatgttccaaaatatggtatattaacaacttaaactctgagatataaaaaatgcaaacaaatagtcataaaacccatattgagaattatattacatattgattaattaaaatcacagatagttttttttaacaaaattaagtaccactattattttccaattttctgaaataaaatccctatttgtttcaacgcaaatatttgtgctgcctatgggctaagaaaaggacaatggtagtatagtcttccacacgcaattagcaggtggaagaaatgtcgcaggataaaaaggctcttggaaccgtggacaggaaaaacaatacaaatctcacgtgctttgcctataggtttagaaaacgacaatataatattcaacacgtatggatagacaatgaaatatcgtgggatgaaaaatcgccaaaaaccatggacagaataaacacaaatttcttgctttctatctaagggctaataaaagaacactggtgtacatatagaatgaacaaatgtgctggatgaaaacaaatatacgctgataaccaagtgaaacaaaacgtcctggatgaaaaagaaaaagcgcttggagccatggacaaaaagaaacaagagagaagtgaaacaggaaaacggataacaaaaataaaagaaacaaggaggaccactatataccgtaatatatagagtaattaattaattaagaaatgtgttcactaacgaattgcatgctcatctttaattctttcaaaaaccagaactgtcaattgtcttacctggactatagttatcaaatctagctatggacaaaccaattaaccaccatatatagacgtttttctgtactgatggtaaagtcaaatccttccggccaaaccgcacgtagtacgagacaagcaaaatatcaatatggatgccttttctgagcaccaacaataatttcgctgtccaccaattgcgaccaatacttctaggtggggtacattgtatgtaggtgctgccaatgaatttgctgctggtcgatccatacatacacactccaatatacgtacgtttataacggatcaggttcgtatggtcacacggtgtgcgtatatatgtctcctatcttgataattaatatatatggccagagccaaacctctggccggagagagaataaacaccatacatgtgcaaaacagccatatgtttatcagctcattaattagtagtcacttatgtgtctgtatagatgaatatggatgcatgcggaataatgctaagtagtgcctgataacgtaagtatgaaatgaactagcaaaattttgagagggagggaatattggttaacttttgaaagaagctatatatttgttacaaacgcatttaattagaagataaactgtaattaagagaagcatgcgatgaaaattaagctttcgatgataagccataattaagaagaacgtaaatcaagttcaaaggagtaaaaaagaaaaaaaaatgaacaaacatttggagctggatgcgactgagcttgttgaattacctcgtgtggtgaacaaggaagtcggcatctcgtcctggtcgccgccccatctggcgtagtaggagagcacgacgacggcgagcaccacggccgccgccacgcacgccgcccgcacagccctcccgctctcggcgcagccgccccgccaccgccgccaccgccgccatggcggcgtcaccagcttcatgcctgcctccgtcatcatcatcggcgagaacgaccgcggcggcggcggcgtggcgcactgctcgtcgccgtcgtcgtcgtcgtcccagccgccgcctcccgcgctgcccatgtatatgcaactatatgtgctaagcttaatcctcttcgatcaatacatatttcggccctctcgaagctacaaatagtgcgaactgagcttggctattcgttgctgcactacgtcaacgtacggagaaacttccaagatgcagcatatgcaacatcgatcacgcggtgttcaagcattcaacgatcgggtcacatgcattatatatgcatatgcaggcatgctgcacgctagctgatcgtcgaagcgtacggttgctttactcggctactgagacgacttgtgcgttcatgtatatatatacaagctaggttaagggctgaccatggtcgatagcggccaagataagggctcgattcggcggcacgccatgctggattgggcgtatatagagctaaaccaggggcgggagggaagggggggagagaagaggtcgtcgtcgtcgctggttgaggaacgaagatatgtggtggagagaaaaacagaagccggatgatccaaaagatcgtctggccatgaaaaagagaggaagtccaggggaagcacgtacgctctctaaaataaataaaaaaataagggtacatgtgttaaggaattgcgggaattttgatcaggataattttaattctgtaacaaaaatgaatatattctgaaaaattggcacgctccactgcaacctgacacgccgtgcagggtgcatgcgcgtgtgtgacagctagtaggctactactacctatgtcccattacaagtgcagccattagtttccgtgcccgaccatccgttttatttgtaaaatttatgaaaaaaaattaaaaagttaattcaagtatagagtactacctccgtcccaaaatacttatcgttttaggttatttagcatgtattaaggtttgaagacaaagactataataccccttaattaataatgcatagttggatttgaatggtggttgggggttcgtttgagctcgttgtcttaacgagccagctcggctcggctcgttaatgttaacaagctaaaagggtagctcggctcggctcgcgagctagctcgttagacgcgttaggctcgttaacgagttatatctcattaatatcatattaataattttgaatttaagattttatcatgtattaacataataataaacattaactaatatagtactcactaaatatgaatagttttgatgtaattaaaagactaagcactagtcaagaaacactaagtttataaagatatggtgatattttatactaacgaactaaatgagcagctcgcgagctagctcgttaagctcacgagctaaaattctagctcaactcgactcattaagactacgagttcgaatcgatccgagccgagcttgctatgagctgattcgagccacgagtttcgagctttttgtccacccctagttgggggtataatggggagaaatttgaattggatcaagtggttgatatgacaagtaatatttcaaagtgacaactacaatttttgaatgctagaaagacaagtattgtgggaggaggaagtactattcatattttatcatctaataacaacaaaaatactaatcataaaaatattaaaataagacggatgatcaaatttggacactgaaacccataactgcgcttattatgggatggagggagtatcagctagtgggccaacggattccaaataatttttgaattttttcacctaagttatatatccaacctagattcgattacaatccaacctagattcgattacactgttatattttgatgaattcttttagttttcttaaataacttttttaaatgttgcacttgttcttattttcatgtttcgataattgtttctttgatgttttaatagttcattagcaaattgttgcacgtggtgtttttgatgttttagcaagtaacttgtgttctgtacatgatataaaaatattttactaaaattatgtatttatatgcatattgtatgtttcatagaattttactgtttgttttactcatggaatttaatgttttatgtggtggttgttggtctttacgcactatatgtatatatttttaatattgcatctctttagtaatgtatgaagtgaatttgaacatttttatatgcggtgaaacattttatttataagcagtgcaacattgctctatcttttatactttttatccaaatatagtagtttgagatcttattgtaaagatataattttatttaactttaacaagtatatcggtacaatcggattaagtaatttaggagaaataaccatttaacaatttagtttaaactttgtatgtgcatgtatagaaaagtatacgtgcacgcatagctagaagtcgaactgtgcaacttaaaaaaaataattgtttggtttccgcatcacataagaggagaacgatgagaggtgagaatgagattttttttactcatggtaatcgaaccaaaattttgttcgactttaatagactgctctaacaaaatcgatattacaggtaccctaagagacttgcggcatcattacacgcatagagatagattggtagttttaatacaagttagtgagatgggtgtttgatatttagctttggatttggtgtacgatccgtggttctttcatttgatattgggctctagatcgggtgcagttgtctcccacgtaggcttggacgtccgttgcgcacacgaatgctatcgtaagtacttattatcagagcaggtacaataaactgactcagcgagctgcaaaactatgccacatcatcatattcctatatggaggggagagaagagaagatagagaagaaaacgactgactaatttgtagcccggcgatagtgatttttttagtcggtatcgctcgcttgcagctgctcccggtgattaaaaacacacattatggggcccgcgcaaccatagcggatcacgctacccctccacatcgccctcccctcccaatccccttcctctcgatcgccgccgctcctcgattcctcttccgatggcgcaatctctccctccggctctcgtgcttctgctcccttccctcccgcgcggctcccgtgcttctcctctccctctcgtgctcgtgaaactacctacctatatatatatatatatatatatatatatatatatatatatatatatatatagtgaatctattctacacccctcccctagaataactattctatacccccctcccatgggtcaaacccacctcccccaccctcccttgggcccaaaacccccctcccacctcggtcaaagcgtcctcccgccggtcaaacccgcccaccactccttcccccacccaccactttgctgctctcgtcttgcaggaatcgtgcagtaacagaacggtcatcgtgcagtaacaagacaatattatcgcagtaacaacgtcaaaaagtagtcatgatggatctagtttcgttaagcgtttttttatgaacttcatggtgcaaacggattggaaaaacaagatttgatgtgagagatattgctctctaaagattgagatttacctcgtttttgtcctcgtctaactagaaaggtgtagtaactagacggccaacgtgtttccgcagtaacgacgtgaaaaaatagttatgatggttctagtttcattaagcacttttcttacgaacgtcatgatgcaaacgggttataaaaataagacatgacgtgtacgttgctgctatctaaagattgagatttaaaatattttatctctaacaaacattagtacaatagtgtcactgttactgtgcatgttctctgttactgcaaatttcatcatgttgttactgccaaaagagtcagtaacaatctataaattttgtagtaacaacctataaattgtgcaataacgtatcatgttactacccttttgggataatgttactacgaaatcatagtatcaatgtatgattcttacagtaacataactaatttgttttcacataattttttacaaacatacaaagtatgcaaacatcatatggtgaattggttaggagagtttgccatgaactatgagatcatgggttcaaatcttgatttcatcaattttttatcttttctaagagaatagcgccgagagagagaaatcgggagagaatcgagagagagagagagagagagaaatcgggagggggagggggcgccgagagagagaaatcgggagggggagggggcgccgagagagagagagagatcgggaggggccgagagagagagagagatcgaatcgagagagaaaaagagagatcgcgcgcgccgggagagagagggaggcgtgtgatcgggagagggaggtgggtcgcgcgtgatttggagggagggagggagggatgtgccgggagagagagggaggcgtgtgatcgggagagggaggtgggtcgcgcgtgatttggagggagggagggagggatgtgcctgggtggtgggagggggtgtagaatagttattctaagggaggggtgtataatagatctactctctctctctctctctctctatatatatatatatatatatatatatatatatatatatatatatatatatgacactcatatggggcaccatggtgcccgggcaccatggtttcaaatgcacaaaatcactcaaatttttcaaaattttcaaattgtgagtatatacctagttaaaagaattcgattcatacctatacctatcaacaaaacaactcaaatttaactttatttcacaatccatgattacatacctaactaattatatgtatggatgctatatacctagaatcaaaatctaacaaaaacaagttcaaattcagttcaaacttgctttcaactagttagtaaagtagttaatattaatacctaaataattgaaaaagtttcatgctcatttgaattgggtatatactcaatttcaacaatggtgcccgggcaccatggagcaccaaacaaatttactatatatatatatatatatatatatatatatatatatatatatataggtaaattaactggtgctacatggagtatgggctccaagattcaaattgagtatacatccaatatatatatgtcaaagaaatccaattgctccaaaattccccatcgcaatattctgccgcttccaatctccttccgctggccacctcgaccacaaccccgctcctcttccaccttgtataactctcccgcccccgcaagaaattcctgcctaaaaccctagtttccaaccaccaacaccatgcttaaaacccttgtcatctaatgcatctgtctttttttttcagtaagatgatggtagttcgggcaatggtcaatgatgcaatggtcatatgacattatccattaatctacttggttgctatggtatttccattatgtgctattggtgccttgtattttttatacaagtaaagtacacggccggtccttaaacttgtggggtggtgtcagtttagtccgtaaacttgaaaattgcacgtttaggtccgtaatcttggtttaatgtaccagggcgggtccaatcggggatttaccgcgtctgaccgccaacgtggtgcgacacgtgggcattgcttctgcactcggccccctccgcatcgatgccgtcaaaaattttacatttcccccctccatgcactgtagcaggcgaaatcccactgaaatccccaaatcggcttgctccctctcaatctcccaaatcggcttgctttcaagggagagaggagagtagggcgatcacgaccgtagtgacctcggagagcacggcgatcatcggcgcagcggggctccgcgagaggaggcgcgccgcagggctccgtgagggccggctcatgacggccccaacctcggcgagcatggcgatggacctgaccttccgcggagaaggaaaacaagcgcctgtgtatcgtgagtacaacccaacccacccacctcatctctatttatctttgtgatgattccgttgagtttaagcagtgaagattggttttttatgccatgtgacatgatattgatatgtgcgctaggtgaaaaatctaggtttagttgtttcttgatcgggttgtgtgttttctgtggtcgtaggccctggttcaaagtatttatctcttgagtttcaccatggtggatttttctgtggtctgggagtaaatcggacttatattgatggaaaagtggattggtttgacaatgaggactctcgggagtggggtagggtattgcaccttccagatttcatagctatgctaggttatgattcaggaccaagtttaaaggtgtactggttgctgccagggaagacactagttgatggtttgaggattgttgacagtggggtggaaattaatgtaatgaattcagtgtgtaacaagattaagaactttgtcatatatttggatcacactgaccatgtatcaggccgaatccatgaagatctccttttgacaccggcagctgagctctctgaagtttttagccctactagagatgatcatcaggaaccaaatttgtcaactgatgaacatactgcaggttttagaactgctaaggtgaatcaaaaatcaaaaggaattgaagaagaggaagttgaagaatttgatttgtttgaggacagtgatgatagctcagctgattcagactttgtggacagtgactatgagtaggaagatgatgatgatgacttgtttgaggacaatgttgatggtggtgttgtagacatatgtttaggaaagaaaagattcagtcataagaaggcaacaggaagtaagttgaagggtaaacaagttagtacagaagattgcactgagcaagtttcattagatgatgaaggattgcagttgccagacaattcagatgatgaaggtgatataactctgaggtttaagtctttcaatctagaggacatcaacaatccagtgttcaaggatggaatggtattcccttctgttgaagtgattaggaagacaatcacaaaatatagtctgaagaacagagttgatatcaaattgcctagaaatgacaggggaaggataagggcacactgtgcagaagggtgcccttggaatttgtatgcatatatgaacagtagagtgaagtcctttgttgtgaagacatatgtggcacaacacaagtgcaaaaaagagtgggttctgcaaaggtgcactgctaactggctagtagagaaatatgttgacactttcagggcagactcaaaggtgactcttagtagcttttcaatgacaatgcagaaggattggaatttgactccatcaagaagcaagcttgcaagagctagaaggctacccctgaaggaaatatatggtgatgaagttgggcaatataacttaggaagtcaaaccccaggagctcattttatctcagtctagatgacagcaagtttagcacactatatttctcactggattcatgcaaaagaggatttctcagtggctgcagacctgtcatttgcttggattgttgccacatcaagactaagtttgggggtcaattgctgacagctgtaggtgttgatcccaatgattgtattttctcaattgcaatggctgctgtggaggttgaatcttataacatatggtgctggttcctgcagacattgaaggatgaccttggtattgtaaatacttacccttggaccatcatgaaagacaaacagaaggtatggttataggacagtgcttgtgaataattttgtttactctttacttcatagctattccttattagtcttacttattgctgtttgtagggtctcatactagcagtttaacaagttttctctgaatctgagcatagattctgtgtaaggcatttatatcagaattttcagatgcaattcaaaggtgagaacttgaaaaaccaactttgggcatgtgctaggtctagttcagtgttagagtggaatgctaacatggaaatgatgaaggacctaaatgaggatgcctataactagttaggagagatgtcaccaaatacttgggttagagcttttttttagtgaattcccaaagtgtgacatactactaaacaatagttgtgaagtgttcaacaagtactccctccattccaaattgatctacatatttcataggtacaccaagaccaagaaaatctaataactctctcatactatatttactctagcaacaaactcaatgcatgcaccatccccactatttcctagccaatagcaaaacaagatattgcatgtgggttataaatacttgtgtgcatggatgcatgcatcaatgtccatttactccaatgcacaaataaagaatagacttaatgaatgaacacaaatatatagatcatttaggaataacctaaaaaaaactatatgtagatcaatttggaatggagggagtacatcctagaggctagagagcttccaattctgtccatgttggagaagatcaaagggcagttgatgagtaggttttataacaagcagaaggaagcagagaaatgggaagggccattctgtcctaaaattggtaagaaattactgaagaatgcagagcatgttaacatttgttatgttttgcctgctggtaaggggatattccaagtccaagaaaggcaatcctcatatattgtagatgtcatcagcaagcactgtgattgcagaagatgggaccttactggtattccctgttgtcatgccatagattgcattagagaggagaggctgtctgaacaagactttctgccattctgctactcaattgaggctttcaagagtgtatatgccaacaacatcatgccatgcagtgacagggccaactgggagaagatgaatgggccacaagttctgcctccagtgtatgagaagaaagttggcagacccaagaaaacaagaaggaagcaccctacagaagtgcaaggcaaaaatggcctaaaactcaacaagcatggtgtaatcatccattgcagttactgccatgagccaaatcacaacaaaaagggttgtccaatgaggaagaaagggatcaagcccaagatacagatcagaaagaagaaggatgtagctccaggaagtcaagtgcccagtataactcaggtgaagatttgttctgtcacaaatgtgaaacaaaatttgctgattactaaccatattatcttgcaggaaatgatgggcacacaacctggaacaagtactggattgctaaatgaggttaatgacaacatgctcagtgtgataatggcagaggtgcacttcttttcatctatgtatttcctacaactgcacatgtactgaattaactctacctataaatctaattttggtttgtttgcagtcttcacagcccagtcagatcactcaacagcaaggtccattgccagattctgctttcattcagcaaaaccaaccttccacaagacctgttgttctgaccactgcaaccaaagaaggaagagcaaagattacaagacaaagaagaaggcatgaagtactacaaagaagaaggcagatctcactgagcaagaagaaggtgttgcttcaaggaagaagaagaggacttgactaggcaaccagtgatgcaaagaagaaggatgcacctgctggcaactatgcacattttgcacattttgttcataacagataggatacttctggtttagatagcacttatccttggtattgccatatattgaatttgaacaatgcacatgtcatgccaaaaactatgcccttttggatagaacagataggccaacatgccaatacttttcctccacagttgtggttcttttatgtaagctatggtactaattatgtaagctgtggtactgattatgtgttgaagttgaaccctggtattatcatgcaatgaagtggccacttcttttcatgtcaattatctctttgcttctgtcaacaatgtgcttgccataataaactgaaacccaggtgcttgctagactgtatggatcatgtttgtaaccacattttctatcttgaaccctagtgattactaaccatatttttttacaattcaaacataaaccactgaaatcaagagacatatacagatttagtcccactgaaagcacaaacacaaaaaccactgggataacatttaattcacatcactgttccattagtcaataagcaacacattacatcagtctttcaatttttttcttcacttcatcataagaacaaccaaaatacaaactaaaacagcaacacctaaccaacctaggaccaacatgttcttcagtaccactactaattctcttccaatggacactgcagtaatcaatgtctgctttaattcatcatcatcttccctcggaacttcggtttcatccaattgtcctgcattcttcaaacttgcagcaacttgtgcattcacatctgcagcctcttctccagcaattaacccattcttcttcaaatatttcatgtatccttcctcccaaaaccagaagttatacccagatccatctttctacaccattaagaacaaatgtcacctcaaattgaactcaacaccacagcacaccaaatgcaatcaactattgctcacctcgtggtcagggcaagtgtagaaaatgcgatccaggttactaactgtcttcgatgtgcgcttcacgacagttttattctcacatgatgggcacaagatcaacggtaccttattccggcgagtacaagcggaggccgagcttgaagaagccatgggggccgcgaccagtccttggctaccacccgtcatggcctcgccgctgcacttggttgcctcccaccatcgccttgccgctgcagttggttgcctcccgccgtcgcctcgccgccgtggagctcactgccgagcgtccaaaccctagacgaattggggattttgggggattcggcgatgtagcccgggacgccacgttggcggtaaggcacggaggggggaaaatgtaaaatttctgacggcatcgatgcggagggggctgattgcaaaaacgatgcctatgtgtcgtgccacgttagcggtcagacgcggtcaatcctcgattggacccgccctggtacattaaaccaagattacggatctaaacatggaattttcaagtttacggactaaactgacaccaccccacaagtttaaggaccggccatgtactttactctttttatactacggagaactactcttgttcatctcataacacaaacttggttgatgtgctatgaagtgtgtgaactatgtggtgttttgtgattacttctgtagcatacaaatattaatgtcacaataaaatggctacaatgatccacttcactcttgatcatacacattaacatgtgctagttataattaatcatctgatttatgagatgtagccagctaaaagacaacctagtgtatgagtagttggctttagaattggcaataaaattaagtgtagccgacaatcggatatactattaaccttgctctcatgcagctctagctagctaccttgcacgtctcgcgcgacgtcgtcctttccatgtactccatatgagcgtgcgttcatccatgcatgttccagtagtcatatgcatacaccttgctcttgatcacttaattagtgctatctccactcaatcataagaccggtcggcacgtgctatatagccatgtgacgtgtagatgtgtgctgcagtgtggacatttttttattaaatactccacaaaaatataaatcatgtttaaataatcttcaacaataaatcaaataaaaaaataataattacataattttttaaaataaaacgaagggttaaactgttaacgccaaaatttggtaagcctgaagtcatcatcggcctagagtcagtatcagcttcagagtcttgggatcggccgatgggagttgtcaagtcgccagcagttttgttcttgatggagtcggatcaattaaaggaagcttatccagaaatgaccgagttcaaggaggatgcgacatggcagtttatctattaattaggcagtatttgttagtttccttttatctttggaaaagtgtgtttagtgtcccataaggtctttatgttttccttttatcttttaggaaagtttctttcttgtccgacaaggactagtatctccccatgggtataaatatatacacccggggtcattgtaattatcacacagttcaatacaactactctcggcgcatcgccaccctctttaccgatgtccttacggtatacttggcacctgacgtggggtcgcatcggctttcgatctccggtgaaggggtaagtcctacgttccgccggccctggtgaatctattggcaacacgtataccgtaaggacaacatcgaactagatgacctagcacggcgcgcgtccagatgagagccgctcgaacctggtacttttctggacgtcctgacaaagccatcagtgaaagaggcaaacgatgaaggtagcacgtttgtccccgacgtcagctcgggggctacagaggcggaacacgtcgttgccgatatcgagaccacagacgactagcggacaccgctcatcaagttcctgagtagcgacgagttgccagaggacgactgttgacgaaaaaatcgaacacaccggcctaggagatctgcttagctcctgtgcaggtccaaatcttgatgagatgcgggcgtgccagttagtttgatcatgcaactgacaagatatgcaaatagtagatcaaaacagccgatcggctgacaagccgatggagtagttccagccgatagtcgataatagccgatgccgataccagccgatagcgatagggtttaagcaattggctatatgtccaatgtacataatgatataaaggcaatcggctgatgatgatgtaatgaaataacaatatagtccagtataaaccaatcggctagcattgatatgatagaataaacactgatctgaagattaaagcatacatcggctggaggtccgatgtcatgaaatccacaagattagattaaacagtgaaacctttgttgtcatcggctaaatctaacttatatgtatatgcaatccttatgagccgatgcaacgtctagataactcaccggctgaaaccccgatgaaacccttattggcaataaagaagcaggctagagattatggttctaagcacgacttagtagatcaaacttaattgatgcagcactaagtatgaaaagaaacataatatctagacaatcaagccgttgactgagttttcagggtggtagatgtctaggctaatctaatctagcaacgcgatttagccgataccggcagaaaccttaaaacgagaagcagccgatagagctaaattgatatgctaagactagattaacagagacatatgataaataggtaggcaaatatatcatccaaaccagagcaatccaagaggtcgaatgtactgatgcagccttgaacgacgccgacgtaaacgatacaattgcctgggccggtggaacattggacttaccccttagccggagatcgaacaccgatgcagccccgcgtcaggtgccaagtcccgccggacgacaaaataaagtagaaaaggtaaaaagtggcgatgcgccgaattgtattgatcgtgaagatagattacatagaccccgggtgtacatatttatacccatgggtagatactagtccttgtaggacaagaaataacctttcctaaagataaaaggacactaaacacacttttgctaaagataaaaaggaaactaacaaactattcctaattaatagatacaaccaccttcttcggacttgacctgtacgtggcagtcatcatgaagcacgtcaactcaatccgacaatgattccaatatcaccttacccgaatcggctacatcggcttgccttgtccgattcggtaactgccgatgcacactgtagccgatgcggttccgaagccggttcataccctatttctgttatcgatttcctcccaaatccgcttcggccttaacactaaatccgataaatgatttaccgaatttcgtcgttaacaacggcgcagaagttgagaagataacccgacaagccaagatttattgtatgattggcaacgatctgtacaaaaaggcgccaaacggagtacttctcaaatgcatctcgttcgacgacggcaaacatctcctcttggacatacatgaagggatctgtgggtcacacaccagcggtcggacgttggtaggaaaagctttccgacaagggtttttctggccgaccgcgctcaaagacgcctgtgacatggtgcagcggtgtgaagcctgtcaatttcacagcaaacacacaaaactgccagtgcaagcgctccagactattcctcttacttggccgttctcgtgctgggggctcgacatactcagaccattcccacgaggacagggtggctacaaattcctattcatggcgatcgacaagttcaccaagtggattgaagtgacgcccacaggggaaatcaaggccgataatgccatcaagtttatcaaagggatattctgcagatatggattgactcaccacatcataacagacgacgactcccagttcaccagtgccaacttccaggattactgcattggattgggagtcaagatttactttgcctcggtttctcaccctcaaagcaatggacaggtcgaaagggcaaacggcatagtactacaagggatcaagacccgcgtctacgatagactcatgtcacacgacaagaagtgggtcgaagaactcccttctgttctatgggccgtgcgtaccacaccgacatcatccaataaggagacacccttcttcctcgtgtatggctcagaggctatgctccctacggagttacaacatcagagcacacgagtacagaagtactccgacgaggaacagaaggagcagcgaagcgacgatgtgaatctactcgaggaacatcgagaaagagttgccatcagagcagccagctaccagtaggcccttcgccgataccacgagaagcgcatcagagcacacacactttcgattggtgattacatcctccgacgggttcaaagtcaagtagggcgcaacaagctctcatccaagtgggaaggaccatacacgatcacacaagtcttgcggccgggtgcattcaagattgcagacggtgatggtcgcgagttagcaaattccaggaacattgttcaattacataaattttatgtataaatcgatagtctccacatttgtaagacatctcatgatttcaataaagttgatttcaggtaaagaatattgtcagagtgtttcttcccgaagatcgcttaccacgacgacacctagagttgaaacctatcctcatgtcactttacgccatcttggcaaggcctctgaggaacctaagggaacttcggcttgggacgcccagagcggataaggccttgttggatcatgcagagacaaacgaccatgtaagatctggtcctgtaagagttctcaccgtgcgtattaaccaagccgtgtaatcggaaattgagttttccaactttacggctgggggttagggtcagtgctttttcaactaaggcaggtcaagggtacaagagtcttatcctccgagaacgattctccgacgacaaggctgggggctagggagagtgtatggctcaggtgactgatcgaagtcgcaaagtgagaaaacactcatacacaacatatccagagtaagaaaacttagttagatagattccttttctaatttacaagtatttcttacaagtcacaaatactttaaagtatattacatgtttcctttagacgtttttctacaggatacaaaaaccaccgggacggccaacgccaatctatggagtggaaaaccttctcggcaagcggcgccatcaactgcacaagaccgtcgatctccgcggtgtcctctgagaacgcgagaatctttcgcgaaggaactcgaggtgcagctacgggcggtgatcttggatgcaggccagcacgtgccctccggcgtagcggctcccttcgagctgtgcgtaggtcccattcaaccacgagatacaaccagccgctgactccttgggatctctgagggaactcgtagctccttgcaaacccccgccatcgccgtgcagtagctcttgaggtatgagttgaaccacacctcgtgacctcggagggcttccacggcctggtcttccttcacctccaccatagccctttcgagttcggccacctcgagcttcgtctttcaatattggattcgatgatctcggtcagccaacgcgttctcgaaatctgctcgacacggaaaggactaagtcaagctgccctcctcttccgagaacacagctaattaagtcaatccgaattcgaggagcgaaggagatcaaaacacaaacccagggacgtcatcgccatgtacgcctccgcggacgggctttgaacaactcccacctccagcacgtgcggctcaagcgtaatcgctagaatgaccaccggcgtatcaggctgcccacgctgttggacatcctcgacatcaacatctctacaacgacaaaagtattcagaatcacatgctaaggaaacaagggaaacgactgttcagataaaaagcagttcgaacccacagagagttttacaagcatgtggattaaggaatacaagggaaaacaaacatcctactcttcaaaaagggggaggacatattcccccaagtcaccgacttcttgtatcatagccttgcgcgcatcattggcggccccccgatccaaagcactcttaaggtctagatcgggatgtggtagcctcatgcacgcaagggcatgccccggtgtagatgccgttcgacgtctcctcgccgatcctggccgcgtgcttggaggagatctcctccatcgccttagccagttccgcgagcgacaatgtcagcgagaactcatcagggtgcgtcgggatggtagtcgcgataccgcactccccggcaagttggtgcaggctggtgaacgatgttcgcaacgaatcgtggatgtcgagtatgttgccctcgagctccgacatccggtgctcgagcccgcgtcgctacctctcgttgccagctaccagctccctcatcttcaggaggtcctcacgggcctccgccagatcgcgcgccagctgctcggcacgctggtttgccgacaatgtcaccgcccgggcctcctccatctcgcgacctacgccgcgagcaccggtatgtaggatgtgctccatctccgtttggagctcccccaggtgagggcatcggtggaccggctctggttagtcacaaggctgacgacagggctactcggtgccgcctcctggtccttggtagcgaccacgactcctgtcgaggtcgccgcgggggacgcactggaagcagcatcaatcctaccttgcgccacctttgcccgcgccatcctgcgaagattttccttctcttcatgagactaggcgaccaaaacttccagaatggaaagacctcaagaacgtttacttacttcgcgccaatcgtcaccaacctctgccttcgcttcgcttaggtggaggagacgcgtccgagtcctaagtaagatgaaatggggtgaggtcaaatctttcctactacgcgctaaagaacgagagagaagcttaccgcggagttcgtcgctttccagtgggtcctgagtatggaggagaatttcctccctttcttcagaatattgctgccacttgtggtggtagcaacagcgtcagatgcctccttggcaacgccctccttcaacgacgttgccgcctggtgatccacgagaggaccgatggcatccgacagagggagagcctgcacaaagtgaagtcatgacacgacctcgagaagagagatataaagggatcatcgagtacacttacattaatcgcggcggcgcgttcggtcgcgtccttgtcgcaaagtgcgatagggatgtcgtccgcctttgaggccgcgctaatcattatctgaccaacgcggcgtcccacagtgttgctgtccaaacttgtaaatcgagaacaagaactcgataagtcaggagaaacaaatgcacctagaacaaaataaaaaatgcaagaaaaaataccccgaggagaaacccgggtcttgtcatctggcccggagtaatcaaaggccggatgggcgcgggcctgcagcggttgaatccgctgacctacaaagtcggcagtaacttcgtatcccgacaacccccgtattcggagatcatcaatgatgtcgatgaaagattggagggagggagttagggcgggttttgcggtctattttgggattttttctggctggtcctcagggacaaggacgggatctgagttttctatctcaagatagaaccatctcgtccgacacttgctacgagaagaggggcactggaaggggatgtaacgcgacttcaggccatcccgaagtcggaatccaacgcatccagacaccctgttggattccatccaacgcaattcataatagaaacgaaacaggtcaagaaaaggcactaccccaatgttggcctcgcaaagatgagagaagatgctcagaaaggcaatggagttggggttcaggtgaagcaaagaaaggccatagaaattcaagactagaagaagaaactcggaaggcggagggagaaaaccgcaagaaatataatcttcgaccacaaccatgcggctcaagatgggttcagattctgtacctccagcctccctctacaaggtcccgcgaccggggagggcactgtcgtcttgcagcttcttcagggacgcggtgtttgaggtggacctctcaagatccatccccgctggaggatcgccggagaagacgaagagcgctaaaaggcaggagggttttctggcgaatggactccaaatggattcccaaaatccctttaaataagcgcactaccgatggtgcgtgttctaaggaaaggagagagattgccgccggaaaactctaggtctgttgcgcgcggtaattttcagacttcaatttaaattcacccatgaccgttgaacttcatgcgatgttgtcgatggctcttttgtgtctacggttttttcaccgagatcgatcaaatgaggacgacaacaattccgacatcagaagtcgcgatcgattacatgagttcatttaagcagaagtcgggggctactgtcagggttaaggataaggtataccctctatccttggatgtacgttgtgtactgatacggtatacccgcgcacatatgggtagcttccgtatacgttaaggaaacctatcacgtgatagaaacagaatctacggatgggaagagttctactcggacagtactgggtctttaccatatcgtgtggggtccgatatctccgagttctacttggagatcagcggacccacggtatataagggaccccctgggcaggacctaaggcgtcgaatatcaccgccaacagatccaccatagcctaggaagccggagcctgcagaagccaactcgccgggagatctagtcgaactaactcgactacggtctcatcggtatcttcgagttctgtcacttcctttgtaatctgtggtttccatcatataatcccataccaactggattagagttattacctgtcaaggggcctgaaccagtataatctttgtcttttgtttgcttgatgtcgtactatgtagatcatcgttccaacggaccccaacaccctctatatccggtctgcgggtatcccccgtcgacagtgttattcaaggctgcatcagtatattcgtcctcttggattgctctggttcggttgatattttttcctaccaatttatcatatgtctttattaatctagttttaacatatctatttagctctatcggttgcttctcgctttagggtttctaccggtatcggctaaatcgtattgctggattagattagcttagacatctaccaccctgaagatcagttcagggcttgatcatctagatattatgtttctttttatacttagtgctgcatcagttaagtttgatctactaagtcgtgcttagaaccataatctctagcttgtttcttgactgtcagtaagggtttcatcggggtttcagccgatgagttatttgaacgttgcattggcttacaaggattgcatacatattggatttagccgatcgcaacaaagattttactctcttgtggatttaatgacatcggacctccagtcgatgtatgctttaaccttcgggtcgacgcttatttatcatatcattattagccgattgatttctacttgattatattgatattttattatatcgtcatcagccgattgtctttatatcattatcaacattggacatatagcagattgctcaaaaccctatcgctatcagttggtatcggcatcggctggaattgctccatcagcttgttagccgatcggctcattgatcttctatttgtatatcttgtcacttgcagggtcaaactaactggcacacccgcatctcatcaacttttggacctgcactggagctaagcagatctcctaggatagtgtgtgtttttcgcgtcaacataaacgtatttgaaaaatcaacaacgccatatattaaaaaccgaaaaggtactgtatacttattcacacggaaaaatggaaaggacatatggaagcaggaagctataatagtacttagtgtgccagaaatttcaaagttgatttttttggaaggaaaatttcaacattgttccggaaggaagtataattgttgatgctgatcggatcggtattacacgggaaaattggaaccatgccattataattttacaaaatttgagatatcatgtgggtcctacatgtcattgactcatgtgggtcctacatgtcattgagataccgatggaatatctcaaactttgtaaaagtacaatggcatggttccaatttacctggttggtgaaaattgttggtgaaaaagatagtacaccttgactgaaacgagaaaaaacacattttcatgtaatatagtatttaccatacaagatacaaatatggaagttgttttaataaattttcccttagagaattacttctaccagcttctgaaagaaaatcttgcgagttcagtacacaaatcccacaaattgagaaaatcttgcgagttcaatacatcccagaaactgtctatgagttgaacacatataggacaaattaaacatgatataattggagagatcaaatctctactctatgcactgagtttgtcgtagtttgataattttcctttgatattatccatttcttaatataaccgttaagtttattaattgttttacaatatacaattggaatgaactctttttttaaaaaaaatacctaaaattggtatgcaggtttgataattgatttaaaatatgaaaatttttatgttgcctcattacacaacatggcatattatatctaagttccaatttctttttggtaattttattttttttcaataaaacttatttatatgtggtataggagagagaaatttttcgcgcaaaagataacaccacagaaatattttgtgtaggacacgaaagatgatttacatttaaacaaacaatagcaagagtattctatataaatttcacaaaaccacaagtattttacacaatttatcacaaaactacagatttaagagcttgtttcacaaaactacatatttagtgtctacttttatcacaaaactacacatttagtgtcttcttttatcccaaaactacatgtttagtgtcttcattatcacaaaactacatttcattatcacaaaactacaggttttaacaatgctaaaatatatagttttttaataatgaagacactaaacttgtagttttgtgataaatgaagatattaaatatgtagttttgtgaaacaagctcttaaatctgtagttttgtgatgtaatgtgaaaagtacatttagttttgtgataaacgtaaatactaaatctatagttttgtaaaataagttcttaaatctgtagttttgtgatagaatgtgcaaaatatatgcagttttatgaaatttactctatatataatggataacttacaataaaaaaaagcattacatcctgagtggtacgtgtttcccgcgtgccttaattatggagacttgatctacctgccacgtggcgttatttatgctcccgaatgcacgaacacgacattcgggagttttcaactttcccgtaggagagttcccgagtgctacttcccgagagtggccttcgggaagctgtgtcccgagctttttgagtatttcccgaggggttttggcacttgggagcttcacagattctggtagaagaagaaaagaagaagaagaagaagaaacattaatgcgtttggttgatggttatgtatggatgggatatgttcatctatattttattggatatgatgatccattttttttatagatagtatgactaaatttcttgtttggtttaactgttgaagggatatagcatggatgagataagccaaaagttagtggttcccatttgtcatatttatacttttatcaaaatataatcgtttgagatctttttttaaagatttaattgtaacaaatataatggtataatcaaatcataaattagataaatggtttaggagaaaaaaataatttggagcttgctaacagaaaatcaaaccaaccatagctgatcagaatatgacacatcacccagaccaaaactgaatggcttcttccgaccaaattggccggatgcactcgtccagcttattgagggaatattcccttttatgaaccgtcccattcattctgccctccaaccaaacaccacagaaaatccggacggctatctcctatctagactcatccactcaattaccaaacacaccttaaaaggataaaagaaacagggaggactactatgtgtcttattattatttttttcacaaaattaagcttcgacattctgttctgacttgatgaaataaaattcctagtgattttaatgcaaatctcttgtgttttctacgggagaagaaaatggcaatggatcaaatgtcgttgaataaaaaaagatgccgggatagggaaaaaaaaggagaagagaaacaacaaaacacattgaaaaattatagaaatattgaagaaaaacaggggagctaggggctattgtatcgaaatagagtgattaattaagaattatattcactaacgaactccatgtgttcactttttttttttcaaaaccagaactgtctaacctacagctatcaaatataactatggatctccctaaaaaaataactatggatcaatagccgccagccgccaaaacagttaaatagacatttttccgtagatggtcaagtcaatccgttcggccaaccgcacatacaagacctgcaatgtggctgtcttttctgagcaccaacaattaattttgaattttcgatgtaggagtatattgtgctacctacatccttcaatatttaatatcagttaatgcaatataaaaaaaatactctataccatcacttaagtttgtccgagttcaataatttaccactaacattgtctctttctacaatataccttcaacaatatgtcattggattgcgctttatttttaaaaatcccaaaatacccatatagacatacaaacttaacaattcatttatctaattaaaaatttcaaaaaaatgaaaattgttttatggtatccttacacaacatgaaagtttgtatataagtttcaagttttcttttatttttttttgaaaatacagcctatctgttatatgcaatataaaatcttttttattgtttttttaatgtaaaccatctttcatacgctacgtaagatatttttgtgctatttaggtttttggtggcggtggcaggtggacccacatatcagcgaccttcacctcatctcatcgctatatcgactgcaacttgtgacatgtgcgatggcggtggccgtcgtcgtcgccattgccatctactttcagccgccacagtagacccctcgccttccttcggcggcggcgacgctaggggatgcatcaaggtgtggcagtgcggcttgcggcgcatacagattgaagaaggaatgagtgcggctgacaactggaccccaatgtttttttatttacatcctatcacttatatgtgggacctatttctattttcaattgttttgatgactaggctgctacgtcagtacaccagcttggagcaagtcaaactgtcacgttagaaaaaaaaagtttttaaaaccaccgaaggagtcaatttgaattggttgttgaagttgggggaggtgttatacccgattttgcagttgagggatatgattcgactaagggtaagagatgagggaggcaaatagacatattccaagatttgggatattcgattaagattcgtctttttttttcacgtgcaaacccacttctctcctctccctttttccatccatttgggccacccttatgtacttctcctcctcgtgatgaggacacaactagctcggatatgaccatcactatcttacgtattcatcaaccaaaggtgcatatgttctatattaaatttacttgttatatatttgaacaaacattgctacacaatgagtttcgtttgtttttgtttgtagagaaacttgcttgggtgaaggaaaagagaccgagcatgtataaggaatgcatgtatggtcaaagaagttgattggggaccaaaccaagaccttctccaagtctacttctttctcagcatgtcatttttagtacatagaagacaagaaataaagttctacacgttttggattcggattcggattcggattcgggcatccggataacatcaacttcaaatgtacctaggctctgatctagaagaaatctcggggcctatgattacttgatggaaagcttatgtagttaattttcatatggttttggtcccacgtcaaaattcccaccgagctatcatgattttgcaaaacaagccacatatctcatccagtccgaatctaatttgggtcttgggccttataattgtgtcgtgtgctaagctcaagggagtgtgcgccctagagcaaccctaggacgtccctaatcatttttattcagtagccgtcatcgtttagagtcggattttacttagattatttctgccattgcagtttcaccgctagattggtttgtggaaccctaaattcgagtgcttaatcattcatatgcaattgtgttgtaatctatcttgtttttgtttgtattcttcgatttacatgtaaggattagacttctcggtaaggtcaacgaggagacgtggtgctacgattgcacggttcggatcgtgttgatcggaagccggatcgtttgtgttaagttttcaccaaatccagagttatcaatacctatcagaaggtcaggacctagtatcctcgtcacctcggcccaacatatgcgttcgacccttcaatgggttgcctcctccctttctctgactggcacgtcgggcccactggcccagctttatcgtcttcctccggacctgaccagattcctttctcgcacagtgccgaaatcgatcccatctcaaatccagcttctccaccgtttctcctttcaaattggatgcgaaatcagaatcccctcgatctcctcttcgtttcccctcatccaatttttgtcaagcccaacgaaatcgaaatcgatccggtggattttggttcccttgtgatatcgccgggtaggaatcggaaccgggccgtgcgggaactgcgttgcgtcacggtcgtgtgaatcaaactcacagatgatgcagacggacgacttgtgggcttgatcactctcgacctgttgcgtggtgtatgcgtgccgcggaaactgaccgcgcgaagaagacgggggaagacactcgcatgacacggacgtacacaaacgacggacgaatcgggatgtgtcgatcaaaaagttatgaattttttaagcagttaagattgattgtttattatattttaaggtttgaaaaaaaaaactatggtgtcccttattaagacctgtttgattcagcttagaattattataacctggattattagaagtaagctgaaacaaacaagtagattattatgctagattagtataatccaataatcttctttagaggagctttttctagattattaagtggctaaagacccactacctttagatgcctctaataatctagaaaaacaaacaactcacagtttattctatagtcagcttattataatccagcttagagtaatctgatttaataatctagattataataatcttaagatgaaacaaataggacctaaatggtgtataggtaagagtgtgaaggtagttgagggtagaataggaaaaattttgaatgggaagtggttaatactatgttgtgaaaattattttgaaacaaatttaaatcctagaaatacaaagtattatgggaaaaggtagtatatgataatgatattacgtggaatactttgagctgctaggaatatagcacggtcaatctgctacttctaggaagcttcagtaattaagatcgaacgtatacatcaaataaccaagctgatcacaccttagctaatactcctaagctcctagctttctctcaatacacctatgctatatatttgatcgacgaagaggtagctctagctgtgcctagctcgcatggacgcggaggtcggcgacggcgtgccgtcgtcctcgccggcgtcgacgacggaggtcgccgtgaaggcggtgccatggtggcggcggctgcctttgttgagcggctgtggcacggggaggaaggccgtgagggcggcgagcgtggcggcggccgtgctgatcgccgccgtcgtgctctcctactacgcccggggcgactacgacgagatgccgtcctctttattcaccactactactgccacacgaggtaattagctgataattaattaattcaagtggtccctaatagctagctagattcatttttaattaactctctagctatatcttgctcgatctcttttcttctgagcttaattaggtctcctgaaagcttaatttccaacgtgtgcttaattatatactatcttagaaagttttcttctaagtgtgtaaatatatgctcgtaactcgtaaaaaaaattctttattaagatttaaaagcaagggggaaataattaatccacaagttcaagtgcagaactgctgatatataaatccatacatacttatcttgtacaaattaaagtaattaactaggactatatatctagctaataattaactatctactcaaaacgtacgcatactgtgcatatattacctcatcgatcagaccaacatatatatgcatgcaaattttctgtagctagctaagtcatcatgcactgttagcaatcgttggtactgtacatgacactattgcacatccataactgaccatacaatggataggagacatactggccatacgaacctgatagagtatatggaccagtaaaaaaattcagccgtagtagtcataactcgtactatattctcttcgtttaagattacttattatagtaaatctcacacaaataaaaggagtggtaacttagatgccaactagtaataggaccacaaaatcgttagctcagaaaattaagctatgcaaattgtctggtaatagttaatgccgttagctagccggccggaaggggttgacttgaccacagcaaaacgacttgccattgtttaaagtggaaaataacatatgagatctctatgtttagatatacatatatgtgcggacgtgccagtgtacctaaatacacaatgtaaacaaaatatagggaacatactctttattaatcttaaaagatcataaatataaattcccaatgtaatatatatgatctgacttgtgcgatgtggtctcctagttcctagggtttcgagaagctcccagttaattaccttcgcaggtctaagcctgcaaaagaaccttcgattaagctgtttgtggtcgtctcgtcgtcttcgcttcgcgttctccatgcatggttgtgatgatgatgtagatgtgtatgtgtgagcgctggcagcgatccacggcctcatcggttcgtgcgctggtgttggtagcgtagccttcgcatcggcttcgcccgtcctccgtcgttttgcctcgtcggtcttgaacaacatgtcgatgtagattgttggtgaaaacatgcatggagttgcgtaacttgaacgacttgacgttacaacagttgcgtcgagattagatcagaggagaatcaggaactgttggagatgatcagcgcatgtaatagctggatttaatcacatctagcaccccgttgagaaggacaagaatgaacatgacttgttgcatggcactatagcactttgatgatgtgtcgtcttccgattggttggccatgttgccacaataataattaacttaatcaacatgcattagctagcttgttgccatccaacagcactggctcgccgtcctcccgtcgtccttcctcctgttgttgctgccacgccgccgtgcgacgtgtgtatgtaaggccaacggtcttccgtcgtctttgggtgctgccatcacgcgtcagtcgccgatcaccgatccgatcatgcgatgtgagactgccggccgccggtcgccgatctgatctgtaaccggccggcgatatttgttgacgcagatcgatagtcgtcgtcgcctgcacggagtgccgccggccgccggtcgccgatagccgtcgtcgcctacacggagtgccaccggccaccggtcgccgatctaatatgtaaccgggcgatatttgttgacgcagatcgatagccgctgccgtcatccggtgccataacaccagcgcacaccgacgcggccgcacgagtgtgctcctccatactctagttgatgcctctccatgcatgcgtatgtacgtgttgcatatgaaataagaaggaaactgatcttaattaattttaccttggaagaccgtcgattccatctccctcctcgtgctcccctgccggacgccggttcgtccaaagccgctcgccaccgccggtgtgctccggccgcgcgcgcgctgttgctccggtgctggatgatggatgtgttgatgacgagggatggctgcgtcgaggatggatggttgcgtcgaggatggatagctgcgttgtgtgttgatcgatgggcgcgcagatgcgttgatgatggatggcttgtgggtactggatgcgttggtgaatgaatgtgtggatgagttcgtgaatccccctggctacccaggggtcgacgccttatataggggcctgaggtcggtgctcgctgcgtccgcgcgccgttttctccgcgtcaaattcgttgcagataaggcttgatcgatcagtttgttatttgttcatatccttcattttatctcttagcctctcccggcgtcaaatatgtgagctttgttaacttctggagcatcagggagatggaggcccagccgcccgcgcgtgcgcagctgggtggcgattccttcgtcattatttctgtagataagaaacaatcaatagagataaacttgatttgtaattcgctctgtttctctgctgctgggccacagtccggtgataagcgcctcgccagcgctcgcgcgaagtaactaactcgatcaagtttgttatagagataaaatcaattgatttgttggttatctcttaattcatctggttttatctcttccgcacgcgtgagtagaagttgttcagataaattgaaaccccagcttatctctctaatttgatcgataagtaaactcatctagccgataaatcaaaactgcggatatgtataatacgccgcgattgtatcattcactgatatgggctaagcccaggggcaggcgcattaaatttcttaattaagcccattaatcacctcacccttaatcaaacaccatatatttgtgtactgccatgcatgcatgcatgcatggatgtacgtagttgcttcaccggccgactgacatagcttgctcttgattcagtatacacacgcatatatacactaattgacaagtatagattgggtacagtgtgtatttctatatttgcatggcgcatgcacacataaaatggagagctagctggcctcacatatacctaatgatcatggctatcaggttcatcgttctagccgctgcaaaaatgccatcaaacagccattatattaaccgaatatggattttcatctcttaagataaatatatcacttcacagacatacaataaaaaattagacttatataatttctaaaaaaacaaattaaactaaaactagctagttattatacacattcgcaattatatttataatttttgttataacatgtaggagtaaaattttaactggcatgtttgtggaacgaaatattttatattaatctatattattatttttttttaaattcttttatcactattcagataacatgcaagcaacgaggggatgtcctcgagagataaaaacactatccccgttaacccacaaccagcacacatatttgggtggaaccactggccatcatggaccgattagtagacggatttgatagctggtgcacgtgagacagttaattaagctgattattagagatgaatactcatttcttgatcaattacggtagtagtttctctgttttagttttcccttttccaaggtgtaatcctttagatgattaaagttaattaatatcgtttgacatgattgtttatcaaattataaggaactccaggcgtacattttatgtattatttgactagcaaagtatccgtgtgttacgatgagaagaaaatacgagtaagttgccatgaagaaacaacattgtctaaaatttaaatacacattactaaaaaatcatttttaatttcacgcggttgagtcgcatgtttgcaccaaaaagtctgcgaaaatagtgattttatcatgcgggtggagcatccgtatgcaaaaatccaatttatgcatacggtgcttatatcgatcacatacaaacataaaaaaataataaaaaagaaaatagcaaaaaaaaaccaaaccctagaccctagctccggtgcccacccactttttcgccggcgctagctgccggaggccgagcccaccgtcgcccacgccagatccgccgccgcctggtgctgtgcctcccattgtcgccaaatccgctgcgtcgttgccaaatccatgcaggagggaggcggtggagccacccagcggtggaggaggtggagcccaaggtcgtcgaaccggccgttgctcgccaccgtggtagatctgccgtgccgcagctggatccacgcgcgtgggaggcgaagcggcggccggaaccgtgtaggaaggaggcagtgaagggggaggtggagtcgcccgacggtggaggaggtggccgcgcctcccactcgctcggtcccggctgcctcttcgtcggcagcggcgccacccgagggcgccgagccggctaccggcggtggaggaagtggttcacctcccgcgcgccgcctacccgccagtcgccgacacggaggaagagaggggaggacaggagagagagaggggagatgatgggtgaaaataatgagaggaggggtgaaaataatgtaaggagaggaagagggaggagaggaggtgaaaattttgaagtgcctgagaggaaaaatagagaggagaaaaaaaatttgtggagtagttatttttgcatgtggaccacttaagagatccgcatgcgaaaacctatttttgtatgcggtcccttgagagtaccgtacataaaaataggctcatttttgcacaccgccacttaagaaatccgcatacgaaaatagatttttgcatgcggggctcttaaggaactgcatgtgaaaatagagatcgatttttgcagacgccgtcaatcacggtccgcttgcaacctataggggttctcgtacagaaaattgttctctctagtagtgacaatgagattacatggaactaacttgacccacaaactatactaaagaaaactgtaaggtaccttgatgtttgaacattcatctattaaagaaaactacgttgtcagcatcacaaatatggtgtcccacactatatgcaaagctagggtgaaagtcaaggcgttaggcccactcacccggtcttccagaaaaagtagaaacatggcccatttataagaagggagaagggagctaagagcaaagctaataatacagtcaacaattgactgtatagaactttacagtctataaatcccctcttttctcctctcctctctcatccatctcagcattcagccttccattatacttgctctaaggagctcgctagagatagacgcgtggcgctgtatgactaagccgcgtggcagccatcctgggcagtcgtcactcgtgatgcttctgctcgggatccaaagcgtggagactggctcgagtgctggccaattggaacgcttataggatgaagcgagcacatcagacgtacctagacccaccacatggtgtgtgttacagtgcgcagcccggcccaccaaacgtaggccacctatatcacattggacctactccaccacaggtccaatcggagcaacaactttaggttctagacctacacaacccaaagtactagtcttatgagtgatgactgcctccaccttttaagtcatgctcccccatcatcaattaccgatgtgcaactaaatccaataatctcccccgtcacatcaacccatgtgaccttgaagatccccatcacagaatgttagagtttctgtcgaatatgtgtacaaagtctgttacagtttagaacttggagttgtaataggtataaggactaaagtaagagtcagactctatcctaggatctctcataaatagaggggcgtgcctgttgtaatcgcatggtgacttagcatagcgagagggagcggttgccggcggcgaccggccatgagtcgatgttgtaactctgatacgctgtatatgttggatcgaggaggagcgcccgtaatcagtgccctggatatgtaggctacggctgaactccgttatcaaatatcgtgtctcgttgtcgtcatcatatttggatctcctatggcattttcttccgcgtttagctaccgatgtcgatttcggggctggttttataacagtgtattgatctcacatgctaagggttgtgcgaagaaaggcctatagaagtcctatgggttccacaccttggggtgggtagaccgcgccacctacatgtctcattagtacaactacaaccaatattaatcaagcatgttgtgctgtaagacgaagagactaaaataaaaaagatttggtatatcatatctctctgtcccgacatccaccctcggctatgccatatgtctaaacaagaattaagagaaagataggctgcctacccggaggttgactggggtagcccaccatggaggcaagcttggatcagctacccgatcagctgtcgcgtggtagtgcgaatagatcagaaccgttcaccgcgtcactactcagtagctgacacctaggggctctcagagtcatcaaggggtacctacctagcgacgtgttggaccaagcacgcgtcacccttgcaagccatgggtgagaaccattctaggagtctccagcagggttaggatgggtctcgccagttggcttattagttacgcaccaatcaaaggttgcactaaggtataggcagtcatagatagtatcctctactttttctcatgagccaggtaggcttccacttgtatataaggagcaggggttttccgaaagggggttggaaaaaaaatgtgggctcccaggtacaccaaagttgctatatgggggtggtaagactagggttattatcctttgaaaacctgaacctaaataaaccttagatccccatcacagaacactaggttcccatatttggacgtattgggcaccgcccatcgacatatatatttaacatttatattattgtgactttgtttattaaagttattttagacatgacatatattttttttacgtataattgtgaataaaacgaatggactaaagttttgttcaaagatcaacaacgccatatatttaaaattagggggactatatataaattttgtgaaattcctatgtgcatccgaggagaccctaaggtctcttttgactttcggaaccggaagcagctcctctgccacaatggccagtgccattggacaatcgagacaaacgtttcgaacctttgaatttttcaggttccagtatcgaattgattaatgcgaaaatcgtatggaaatcttgagaaattcatgtgttccacaggaaacttgtgcctggagaaataattggccaaaaacatgtggtattacagtctaaaaaaatgaaataattcattcaaccaacgttcagcttcttctgctgattattcaggtttagaggacgcgcctccttcgaactcgaacctcaccggcgaccagctcctcggcgacctcctctccgccgcgttcagctggcaatcatgccggagccggtacgagttcgccggcgcacaagccttccccctacctcgtcgccaagctccgcagccacgaggcgctccaggtgcggtgcggccccggcacggcgccgtacgagaaggcgctccggcagcccaagtccggcgatggcgccatcgctgctgatggcgacgacgacgactgccgctatgtcgtatccatcgtctacgaccgcgggctaggtaaccgcgtcatccccatcatctccgccttcctgtacgccgtcctcaccgagcgcgcgctcctcgtcgcgccgtacaacggcgacgtcgacgccctcttctgcgagcccttcccggggacgacgtggattcaccccggcggccggcggttcccgctccggcgcctccgggacctcgacggtaaatccagggagagcctcgggaccttgctgaagagcaacgccgtctccgtcgacgccggcgggaatggcacgtcgtcgtggtcgggccggccgccgccgtacgtgtacctccacctcgacggcggcgccgactaccacgacaagctgttctactgcgacgagcagcagcgcctcctccgtggcacgccgtggctgctgatgaagacggacagctacctcgtcccggggctcttcctcgtgccgtcgctccgtggcgagctcgagcggatgttcccggagaaggacgccgtgttccaccacctcagccgctacctcctccacccggccaacgccgtctggcacgccatcacggcctaccaccgcgaccacctcgccggcgccggccacctcgtcggcatacagattcgcgtgtaccacgaggagacgccgccggtgtcgcaggtggtgctcgaccaggtcctctcctgcgcacgcagggagaagctcatcccgttcccaaccgcagggacgacgacgaacacgtcgtcgtcggaccaggccgtgctcgtgacgtcgctgaactcgtggtactcggacaggatccgcgacgagctcggcggcggcggcggcgtgcaccagccgagccacgaggggtggcagcggatgggcgacacggcgcacgacatgagggcgctgagcgagatgtacctgctcagcacctgagacgcgctgctcaccaccggcttctccacctttggctacgacgcgcaggggctcgccggggagcggccgtggctcatgccgaggcggcctgtgtgggataaggagcccgcgacggaggtgccggagccgccgtgcgtgcgggcggcgtcgccggagccgtgcttccactcgccgtcgtactacgactgcgcggcgaggaggaactacgaggacataggcaaggcggtgccgtacatccggcgctgcgaggatgtgagctggggcatccagctcgtcaaaggaagcagccactggtagtttactcaactgttggtcggtatcctttgtcaaataacgaattggttaattgatttggagtaaagtacatattgccggtccttaaaagttatagggtggtatcacttagagccgtaaacttaaaaatacacgtttaggtctataaacttggcttaatgtaccaccgtcagtctaatcggctcttgaccgcgtctaaccgctaacgtggcgcgctaagtaggtatcatttttgagcacggctacctccacatcaccgtgttttgaaatattacatattccccatccatgccattgtagctggccaaatccccaaaatcaccaaattggctagggttaggacggtagccggcgaggcccatggcgggaggcagccaaagtgtggtggcgagggcacggtgggagacaaccagcaaccaagtgcaggtcgcagtcccatggcttcttttagctaggcctcctcctgtagtcgtcgaaagagggtaccgttaatcttgtgcccttatgcgagaagaaaattgtcgggaagcacatatcggggaccatcgctaacctgaaccgtattatctacgcttgtcctgagcatgagatgagttatgagtaataattgattgtgtttggtgtggtgttgagttcggtctgagctgacattggtttttaatggtgtagaaagatggatctaggtataacttctggtaatgggaagaaggatatatgaattatttgaagaataataacttgattgatagagatgaggctgtagatgtgaaggtgcaggtttgaagattgcagcaaaattggataaagctgtagctatgaggaaagatgatgaagtaaagcagatggtgattgctctagtggccattggaagaaatagtagtggtactgaagagcatgctagtactgggttggttggttaggtgtttatgttttagtttgtacgttggctgttttagcatcttcggtccggttcttttctccaacaaaagttggataaacttttagattctcgtggcatgcttttcaaactgctaaacggtgtgtttcgtgcgaaaactttctatataaaagttgttctaaaatatcagattaatccattttttaagtttgtaataattaaaactcaattaatcatatattattaccacctcgttttacgtgaaacacttaatattcatcttcatcttcagaagattcaaacaccatcgaagtgatgataaaaatggaacaacgatgtaattaaaccctcctttcaatattttttatttttaaattatgaattttagttatttctaaattgtacttttatatcgactgatctagactcttctttaaatatttctattttaattcgaatttcaatcaattctagttgtatttctatatggactcaaactcatctttcaatattcattttttgttattccgaatttgagttatttctaaattgtatttatatgtagactctaaactccacttttaattttattatttttattctgaatttcaattaattctttattcctatatggactctagactatctgtacggactctaaaatttttttaactagaaaaaatgcccatacgttacaacgggtgaagtctattttaatcttattattattatatggtttagttaagatgaaattcactgtggaagttcgccaggatatatatatatatatatatatatatatatatatatatatatatatatatatatatatatatatatatatatatagaaaatcatgagctgcagttaggagtccgatcgtctcaagttagcatgtgagttttcttaaacagatttcttatgtgattccttttgtattatcaaaagtgaacgatcttaaaaaccgactcaattacggatatgtattttcaaaagcaaacaaatttaaaaatcgactcatacacggatgacgtaccaaaataccggcaaaaacatcttcaatttttagtagagaagagatatagattaaaccaaaacataaaattaaaaccaactcaaacacggatgacgaaccgcgaaaacatcttcaattattataaccgactcaaacaaggatgacggatcgtggaaacatcttcaatttttataatagtagagatattctaattccaaattttaattataaattatacttttatatggactctgacctgtgctttcattttccttattttttatttgagaatttcaattagttttaaattatatgctagtatggactctagtcttctcttccaatataccttacttttaattttgaatttcagctatttttaaattatatttctatgtgaactctatttttttcttcgattaatatgacaatttttaggctgggtgagagaaacgtggagggttttttctattactttaataagtttatatatttagtgtgattataaaaaatataagtcatgtttaaagtaccattttttttgcggggatgtttaaagtaccattaacactaacacaaaccaagtcataagaaaacaaatgatatttataaaaacataataacacaattggtgacaatcaattgcgttaaatatttataacacgaggggaatgagaggaatatgcaatagtacataaaacctcatcaccgttggaaaaggcatcattgccagttaaactggcagtacgcaggcggcagtgttgctactgggtagccggttaattttcatttcagaaaaaagaaattgtcacatttggatgacatttcaccataataaaatcagattttttttccctgccccatatctccattgtgaagaaatattttcacagaaacaaaccggtcattagtgaggagaatttatcactagtatgaatataacaattgttcttataggtagcaatttcctccgcagaccgtggggccagaacccacccctagggggcaggggcaggtgaagttttcgtcccgcggggcttcgaggccaaggccatggtcttgggtgggtgcggggatgagaaaggcactacttgaaaaacgattttgcatagcgttatcctataattttcgctggcggccatacgtaagaaccgtcagcaaaaatataacgagaggaggggggttacaaaccgccagcgaaaaccgattttcgttggcggccatgctaagaggtccgccataaaaaataactctattttttgaggcagtcctcttaagtgtccgctatcaaaaatcgcgttttcgctggcggtaggtaaaggggaccgctggaaaaattttttttgaggcaaatatataaacctaccgcacctagccacctaccacctccaccttagtctcctcctctcctcccccgcgttctctccttctccctctccgtcctccatcgccgtcaccaccgccgccgcgggctgccgtcgcctcttctccgcgagcttggagctggatccgtccgccgcgtcgacggggaaggccggatccgctgccgtgacgacgggggtggccggatccgccgctgtgatgatgggggtggccagatccgcagccatgtcgacgggggaggccggagccgtcgccacgacaacgcgggtggccggatccgccgccgcgacgactggggaggctagatctgctgccccggcgactggggaggccggatctgccgacgagaccttggcagcagcgcggggaagggggcggcggtggcagcggctctcatcgtcagcagtgcgggggagggggaggcggggagtggatccggcgcctcctccctccccaccggcagcggtgaggtggtgacgaagagagaccggcggcagcacggatctgacgagctcgactaggatttttttttggtatgtttccagattatccagatgatgcagatgtttagtgcatgttgtgatgtttgatctgtttacatgatgtttgatctgtgctaatgatgattttgtattttgtgtttgaatttggaaatgagcagccatatgcatatgaattggatttgaattttgaaaatgaattaataggcttttctccaaatcttcactagcggctgggcagctgcatgcatatttttttggcccaaaatagattttcgctggcggccgatttaacacagccgccagcgaaaatgaatttttgctcgtggctggtgtaagacaaccgcgagcaaagatccatttttgctagcggctggcttaagacgactgccagcgaaaatgaattatcgctttgctttgtggtggctccaaatttcgccagcgaaaacctaaaatggccgcaacgaaaaatggttttaatagtagcgagggaatcacttattttatatatatatatatatatataaccacatttagtactcaccacattaaacacagttatacaaggttcatatatatataattataatgacgcatatggaggtaatttaaacaagtaacaatatggaggtccagtcgctgttgctgatgatgcatccaggaaggtggtggtcttgcgtatatatgtagcaagtttcctgtaataacatgagcagtacgtaacagcaagttcaacgtctccattcctccaaggttggtgtttccactccgatattcttcatatctatcatgtttgctgtttaacataaagtagtgctcaattactaagtaattaatcagagagtacataatcaacacatgtacacaaggtccagtttcagttatatttacacttaaaataaatcctatccgttaaggccttgtttggatgggcctcaatgatggcccattatgaaaagaaaaaagaagtccatttactcccccaaactaatccattggatcacttaaccccttaaacttttttttttcacattttgcactttaaactattgaaaaaggttcactttactctaatatttctctcttttatgttacattttatacaagttgtattctaagctgaaaattttggagccatagatgaattcatatctaaattcaaaaatatttttaatttttttcataaatatttgcttgaactttataatattgatgtttcgattggttttagatgtgttccagcctacgtaaacagtgagaaaaaatctacaaaaaaatgttgagatgtaaattgtaatgcatatatcatcatatcaaactttcagtgaaaatatgagttatataaagagaatgaaaaggagaaatagtgttgggcgtaaactgaaccattttcaataattcggaggtgtaaaataagcaaaatagtttagcattccggtgaaatagttcgggggagtaaatgaactttttcctttttaaaaaacaatttatgtatacttgcaatttagaagccatgcatgccaaaatatgacacacacatatgtacacacatgtcatgaagtcaattaacaagttcttgcaaatgtgtgttgaattccttccttttgaaatatgtctttatttgtgttaaatagggtttaccatgttttgtgggacttcaatttctcctcatgtaacaccttgaaatgaggttaacaatttccaattgtaggcaactcatttgtcaccaaaaactttgagtgggcacaactatctagcttgcatggtttgcgcccaaaggatgttgcgctgagactctacactatctccagaaaaaatggaacattgaagaaggccattgaacaggacatgtgatacaagatgtcaaccccctacagaacacaatgcaagaagtacatttccttaacgacgaacaggatggaatcacttgaaagctcataagacatggagaacacatggcagtatccacttacaaagtgtagttctttggctccatcaacacgaattacaagatgattatctcgatgccctaagcgccgaagaaatgcaagatctttccttggcaataggtggtctttaccgacagatgagctattgtagctttcaggtcatggtgtagcgaatgtggatgtctgatagactagcaacctatggctgaccaaacagtacctactactcactctatcggcacacccaaagacaccctccaacttcctagcaaaatgtagatatacagagggaatatgggacatgctatcaacatggatcttgctcgagcaaatcaaaccgacaatatggagcatagcttcaatagttcatgagtggtggacgatgctgactgcaagcaaggggcgaccgaaaaaaggagtttgcaccatcatgctactaatggcttgaaatattgaaaggagaaaccaaaaaatgtcccaacacagagaactttctgcgatagccctagtggcgaaagttgaggaggccaaaacttagactctaccagaagcaaaacgacttttagagcttatcccttagctttactttttttttctttgaactattctcacaataccttttactcttacattcaatgaaattggcatactctaattgccgtgtgacatcctggcctaattaggatttggcctatgtggcacatgagagctgtgtgcgcatgtttagtaccaccttactactttagcaatgttgtaacaaacttataagactttgttcctctaaccatatcacttctgggttaactattttacatgaagcgagtacgaaagtgtaaatgagatggtctatgtaagtaggccagcctgtcggttgggctgggctgcgttttctggaggacagactgttataaatgatatctgagccgaccctcgcggttgcgcgtatgggtcagtttgtgggcatatggcacatgtgggctttgtgtgaggcatatggtgctagcactggacgtgcgggcgtgggtagcatttgtctaaggctagccaataaaacaaatttattttcttgtgaaaaatctcgtctgtgttgggtcgcaaaagaaaggagttatcgatgagatacacatttttcccgtgtgtaatttccaagcttccacaaatggtcatccgtaacgggcgctaaaacaccccatcaaaggtgacaaccgtcacttttgttgggtgaaagttgaagcccgtcattgatgacacattcgtgatgggcttttagaagtgtggcgttttaggaaaaccttatcggtgatgggtggaagttgggcccgataaagaaatctatcatcagtaatggctactcgcccgtcatagagaggtttttcacattattgatcacttaacagtgaccacacacactttgccgcaatgatgagggttccaatccattatggatgattcgttctattgtcgtgagatgttttggttttgaaagttattgtcatgccccaatttccgtttgggattaaaaattgggtgcatggttttgctggtcacacccatggcaaataaggaccggttcacggaaacattggaatacttaccgcgcttaccacaagcaagaatgggtaactgctggacttgtataactttcccctttccgacattcccaggcaaggatgggtgtggtggagtttggatgggccctgcgatggcctatgtggcttccggattcacctagtcacgagggggttgcccacctttgttttaaaggtgggggcaaaacctgcggtgtggtgcgcatggtcagggggagttatgcgaagcgttttgtcacaatcactcgacatgtttacgtgtttggccggacacggtgacatgccgatggattgtgtattgtgtgtacagttgtgcacctctggctagcgtaaaactattcgaatagccgtgtttgtggttatggtcgatcaaccagattcaccgtgattagtcccacattattaataacttgacataatgaactggtgtagtttaggtggtttggttgggcctgttcaacatggtgtagtgttgttccgtggacatttaatcttgccttaattaatcaactattttactgttttagactagttataaaatgtttacaaccgcctctatgtaaattgccgcaaacccctctttgtctccctatgcacgcctgcatcattggtgcgtgcttgctaagtacgatggttgtactcagtctcgctattatttcaacttttgtagaagcgtagtgctcctgagttgaagacggagttagaggataaaggcttataccctagttgagttttacctatggagtggagctgaagcctcgctaggatcgcatttttttcgttgctgctactttcttttcggtgtaaggatcactaagtgtcttttgtaagtatttatattttatttacgtttggatctttatattaatttgtcattttatgtaccctgatttgattagaaacaaaataatctataaatttggctaaatttttggacgtgacagatacatagaaggtgaagtgtgaaaagtgtacttacataaatggatctccggcttagcagcagctgttgcatcaataatgacagcaactttgtcgtagtccagtgctacagcatcaaagactgtctgtcgaatgcaatttggtgtttgaacccctgaaattcaaaagcaaattaataaatatataagctgtaacgttagtgatgtgcaatgtggtactgaagtactgaactctcaagcacaaaagaaatgcaaggtatgatatatgatttgttcaagatatggttttcccatggatacatatgtgtatatatatattttaataatagaatttatttctggcctttgctacagccaattattataggttgcaggacaaatgaccgcaaattacaaaatcatagcttgattaaatatatattttgtgcttaccaacaataaccaagttctttattccagaggtcttgaggacagaatcaaggtgcgttgcaaagaaagcactgaacctagtcttcaccaacttgtaatccccatctttgatagtaagcccatcagcgagctcagcacctttggaaccttccacccctaggcccttgccactagaatagaagtgcctgcgaaaaagttcaacgtctctcccagaagggtcatgctctctgaccacctgcatatatgcagttcatcttcatcaatcagttcatcagtccaacattcatggcatggcagcatctcaaaatgagaactttagagcccctaatttatagagcataatgtatacaaggaaaaggaaacagaggttatttcacaccttgtacttttgctgaaggcaaaaatcaactataattctttaaacttctaaaccagacaaactttacatgacatttgatctacatcccttcatctaaatcggacaattttggtctatggaatatttaattggcaatctaatcaacttaaaaaaaaggtggtgagctccacatgtgtcattctccctgctatttgtcatattccaatatgccttctgtaaatgttttttttgttatacatctttccctaccttttggcacggtgcttctcctcttttgctttatttattctctctccaattttgaatcttatccccaggttgtgtgtgcatgagttcagccttttttttatggaattaataagaagtgcattgtcatctccctttcattgttgattgcaacctttttttttttctttttgtgatgacacaagtgcaacatgttgttctcctgtccctttcgtttaactgttcttcatgtggtttggttttgtctgtcatctgatacatgtttcctagctcagtggtcactgctaaacatgttcatttttgtctgttttctcccttagtttcttgtaacatgtagatcagaagatccaaaagggaggcaatcaagcagatagatgtatggtggcagcctatggcctctctgtgacttgaactggtggctgaaaagtgaacaaactgaggaattaaccaccatctgaagctgaactgttgataagtgttgcaaacccaaataatggttgttctgattcgagcaagttcagaagcgactttgcagaggacggttttagagatgcattggagaaaggaaaaaaataatatgacgcccctcattagttgagtagtgtgttgggaatggttggataggtggaggtaataaggtggggacaaatttaggtcaccttataatcaaaggatttgtgaaaattttcacaggattcaaatcctataggaaatttttctatttgatatatacaaaggagttgagcttaaatcttatgaaatttctatggaatggctaattgtatgcaaattttagaggaaactttagaaaagctccaaccacttgaaaaattttctttgagtctatctttcttatctgaatcctgtgtttttcttcctgcctaaccaaatgacaattcctatgtattttcggtattttgtaattctctgatttacacttctattcttatcaaaacccaatgttttttctattcctccgttttttaaattatgcatttcgaaatgccctaaatttggagttgtttttggagggaaaagtaggactactcaatcccttatatttggcataaaattcgattaatattccaatcattatattatgctatgcgaaggagatagtaattctgaaatgaacgagatgaccttttggtagttggcacaagaacatataatctagttctagtttcacactagttatagaaaatagatttttgcaagcagacaaaatggatttttctaggtagccatccaccccacatgcaagtaaaggcctacaaaaatatacgatttttacaagcgggcatcagctccgcctgcgaaatctgcaggcggtataaccacctacctgccaaaatatactccgtgaacaaaaaaaaatcccccatccgaccgtgctgccgccgtcgccagttgcccggcgccacaccgccgccaccgccccttcccatctaatgaaccactgtcactcctgccgctcatcggagcagccgccccagccgctcctcccgccgccgacaccgctcctcgtcgtcgagaccctcgccaagactattcctcctcggagctgccgccactgcccgctcctcctcgtcagagccgcagccgacgccactcgtcggagccgtcgctgacgccgcccctaccccaggcgctcctcctcgaaaccgccgccgacactactcctctggttggagccgccgatgcgtgaagtagcgcgtgtgagagacagagaggagggggagggaaatgagtgatggagaggataagaatggttcttagacactactcctctggttggagctgcaggtatgatttttgcaggcagaccacattagacgtttgcctgtgataatcgcaggcggcaccttatgtcgtccgcctgaaaaatcaatcttcgcaagcggacgacggtctcgctccctgttgctattttcgtagacaggcatttggctccgagaggcctacccgcctgaaaaaaatacctcatctgagaaaatggttttcttatagtgtgtcataagacctttttgggagagtgaactaaattttaacatggtataagattcctcttggattggatttataaaacgatcagtatagcttgttacatataactgataaatcattcaaccaccacaactataaatcataggggggaaaatgagatgcatatgaaggacgataatattggtatacaattgtaacaatatgtgtacattaagttaaaatacacggcttgctcaagttcaataaaaacatgcaacatgtggtagctcataattaataaaacccatcggttaataaacaatgcatttctatgcgtgcaaacatacaaacatgctgctggcatgcttaaagtactttcgatgatggatctagtgatattcttttttacttcacttaactgaacaatttaataaatatgttgcttaaagtttaagaaaaaaagtcaattgcttcatatatttgtgttatatttgtattgatgcccacaagagatttgttttttaaacatttattttctaaaactacaaatatataatacacatcacactcaagtaagcataggctacccagctctagcaatgcaaatttatagcgctagtgacggctagctaaaaaataagggcatgtttgaggaaactcgtaattaaggtccctaccttctttagctagtcctaaaatccacgatctatctcaaactgatcaaattgttcaataatatgtataagcttgttaagaaaaataaactatatgtaggctattatctgagaatagcagctagcttcccacgagattctaaggaaggacctgttaaattttttgagtggtacggtaataatcacccaccatatgctacatgctagactcaatcccaagttagagggactaacccagacgatgaagataccacgctgcctcgcgacggcgactgctgcggtgacagtgggtagaatggcctcaccggccaatagcgcggcgctgcttgtcgccggatccacgaaatccttctgcattaaaccaccaatgcaactcgagcagaaaaaccattagatttcaaccgcatagcatatgacatatctctctactattattatcaaagtgcagccatcctagcttctctccgtgtctctattaggaaaaaagaaccattctaccaaaaacggtacacccccaaaactggcaaaccgagaaaaaaatggacagaaaaattgaaccccacttaaaactattaacccgtcttttcacacaccatgttgtaattccacaatagtaatatcagctaattgacatgtatacccttgatcgcgtgagtaggtgtatatatacctgcatatcgatgacgagcatggccgtctcactccactcgtcgccggagccggccaccggcgccatggatatcaccaagattcgcacggccggacagctcgatctactcgatcgggattatattaatcctcttgcgatgtagtgtgtgactgtgtgtactagctagcatatatagcactgcctgatcatggagagaagaaaatggcagcactggctgggtcctttttatggttggagaggagcatttctataggtatagcagcagcagacatgacatggacggtgatcggcagcgaccctagaggtgcgtgatcgacggtaggtacgtctaatcctcgtacgctggaggactagtctcatggtggcgacacgtacgtacgccctcctctaattacttttccacactccatcgcgtcgatcgtctcatctatcgatccccggtagtcaatcaggggcagggcgcattgccaacccaagctacaacgtgccgaaattttaacaaaaaatgatctttctaaaaaacttatttaaagcatggacataacgaaaacttaattatatgtttaaagaatgccaaacttcacacagttataacgtcccggtgttttttcctttaattttcccctctcttctcgttttcttttcttttctctctctttctttatctttctttttcttttctcgtgtctcgtaatattatttttaaattgatatgttttatttgcaaagtttgttttattttgaatgatatggaaaatttaggaacttaaattatatattaggttactagctatctacaaatcgatgtccttgatgaaagtttgaaacgagcgtaataatatacttctttcatattggcactcgaaatcaaattcaaaataaaaaaaattacaaacgaaacagatcaatatgtaaaagaataagagtgagtagtcaattgaaaaaaaaaaacttttttctcttactctcctaatattatatagaaattcatataaactaatctaaatattatataatttaagttttcaaatctgcaatataatatgcttcatttcatatttttcaagttcaaaataaaaataaatttacaaataaaaaaatattatttttttaaagtatcctatcttactgtaaatttacaattcattaaattctaaagtgcagcatgtaaagataccatatcattatccaataacaattattacatcttaaacatcatacaaagtatgctataattctataatttattaaattttagagctctagaaatacaaaaatattaaatcatcatccacataattcacataatatgtcaacatatctctccatcattttttattcctcacttaattaatgttatttttctcttctctcataagtcgtatcaaattaattggttttagcctttagatgaataatctttaatccaaattatctccttcatttttttctctcattaagccatatcacctcaactgtttttagctcttaaatgattaattcatagtccaaattatcttcctatagttcatcctcgcttagttaatgttatttctctcttttcttattaagctgtatcacattgattgtttttatctcttagatgattaatctatgatccaaattatttgcctcttttcttctctcattaagccatatcatctcaattgtttttagcccttagataattaatctatggtgtaaattatatccctatagttaatcatcacttagttaatattctttctctctttgcgcattaagccatatcatatcaattgtgtttagcccttagaattaatctacggttcaaattatcttcctcattttcttctctcattaagctatatcatatcaactgttttttagaccttagatgattaattagtggtcaaaattaattatctctctcattttcttctctcgttaagccatatcatctcaactattttagcccttagtgattaatctagggttcaaattatttccctccttttcttatcccataaagccacatcaccttacttttacatttgaatcatcattattccatatactatttaaattatcataaatcatatcaacttatataagctgattccacctagttatccattatttactaaagtctcacagcaacgcgtgggtttcacctagtattaggagaaagagaaaaggaaaaaaaccaaaaaaatggacaggatggacacccaagggcttataactgaagaatttaaccaccacactattgcggttctgatcaaagaatatgcctgtgctactatttaatccgtggagacctcaacgccaagtcatttcacactaagctatgatgacttggcaaagtcacaacacctcggacgagagctcagcaccaatattgatggcactaagacattatagcttgatcagcgttatctaggttagcactaagccaacggttcatttttcaataagatttttttcacggttcattcttcgaataagttttctaaaattatcatttttgtcaaaattttgggtacaacgtggccggtagcccccactgctacggaaaccatttctagataaacagctaaaatgcgtttggaaaggtggtgcagatgatggcctctaataaaaagcatgtgaaaaatgatgcaaaggacaacgtgccgccacagacggcaggcaaccttatagcggccgttgttggaagtcgatttttagagatgatcagctaagatcaccagctaggaaaatagggataggcggtcgactttaactgaccgtttctagcctctagaaatatgtttccacatacagccggtgacacaggccccagagctagcatatactgcacgggtaaattcccttatgagccgtgcacctgtgcattgtaggggaacatcatcaaaagtcgtctttattagtgcccaaactccatgccgttggagcaagatagctgctcttaacaaatcaaaagtactctagctaaagcagggagaagaggacagcacccaaaaaagatactttggtgccggttggaaactggtcataggtgtcggatttttcaactgacccagcagacgacactaacgacttcgattatcgtcgctgtagacatacatgtgtcggtttttatcaccgaaacctatatgttattcgatattataggtgctagttctaaactaaagtgtcatgtgactgtttatataggtgccggttctttaaaactataaatagcatatatgtgtcggttgttgaccagtctagacacgtggcaaagactataggtgtcggtttttaataaaaccagaactttatagttggcaagaaaaaaaaaggcagaacctaccaatttcacatacaaatcatacaatcacaaaaattccaataaattcacatccattcatcaacatacacacaatatagcactccgggatttagatggcgagctcttcggctctaggaggcgaccccccatggtgatctctcgtagccggcgatggtcacacctgcgcctttgagaggatgggatttctccctgggggattccatccgtgatgaggcgtggcggtgttttggttctccggtgcatttctcttctcacttcagttcttctccgtttcgtttggtggtggatgttccaagatctacttttcggttgacaccgtcttcggtggcgctttacctgagggccactattcatggttctccatcgggttttcaagttcaatctctaactgattggagtttctcgtttgtggtgatgggatggaggagagtggtaggagctcggggagaagggagtgggaggcggggcccgctcagccgccgcacattcctccccacctcatgtcaactccatcctccccgagcagacaccagcgaggacaaccccacgctttcccccgccgaggacatgctcgagcgcaccaagctcgcccaggttccactcacttcttcaggcttcggctaagtagagcagtaatggtgaggatgtgtgatgtgatgtgcccttgtgcttgctggtggtctgtattgtgatgtcaataagtgatgatgaagttgattcatttcatttatactaaaatttgcttttttttgttttgatagaactgatgaagatgacaatgatgaaatataaacaccggcgacggaagtaatatgtgtagctgcagtgagtagcaactgtggggttgatgagaaaggtatttactttcatctataacattcatctgttttgtgggaaaatcttgccacaattaattatgatgaacgttgccttcacttatttttctccctggtagagttagaagtttcaatctgaatggtatctgtggaagattgtgggttatttttctaagttattatttgtgttgtaatgcttcaatgcggtgaataaaatacaggcatctccacattttattaactgaaaaactgctcaagttacagtgttgagttagatattgacagtctaacagatctagttatagtttatccattgagcaactagtcttagtttccattgctatgttttgcttcaattgtacaaccttttcatgtctttgcctatttgtttcttataactttatcataattgcaagtatattcaagtatcaactctaggctctgtaccatcaatcaactaaataagttgtcgctagttcttgtctcagtgctttgagtattgctttaattgacatgaaccatgaactgcttgtatgctaattaatcttaacctatgtttactgaaatatacacttgttctttttattgtgttgtatggtttgtattgcattagagataaatgtatgggacatgatgtagggcttgctgatgatttgtatatattgtgatggaaaaaggggtaaaggaattacaggtagtaaaaaaaagatataaccagtgtatacttactgggtaaaaaaaaatataaccatcctatatgcgcttttcacgtgaactcaagggaagtccacacagtaaactggtgaagctcctatgtcaccgttaccgtgagctggcacttggtaacgccgttatcgtgcattttttacctgttcccgtgtgaccctggggcacacaggagccttccggtctctagtagtgccttagtaatggttgatgggataagtagcattctagaaatcattatatttgtggataaattttactgttaaggatgctaatgtctgtgggcatccaccactccatatttggttggcacggtcagcactagatgtgatgccatggacttgtgacttaagttgtgtgctttgttcagttaactctatcgaggacctgctttatctcttctttcaatgttcttttgcacagagctattggaatgctcttgtttttctgggatacttctctgagcatggatagtatgatgattcatgcaaaatctcactatcagggatagtgttttatggaaaagtttgtgtatggtgcatggaatatttggaagcagaggaatggcttcattttttaacaaaaattctttccttgtcttcctagaggcaactcttaaaaggtaacctcctcctcttgttgtttagaataagtgagagagataaggatgtaatcttaaattggattagtttgttgtaatctttctcattatacctttcattaataaagttctttaacagcggggacctcccttgcggtatttctttcaaaaaaacacacaatatgatagccgcattcacattcatccaaatacacatccaattcacatccattcatcaactaacacacaatatgatagtcacattcatcacattcatagccacatccaaattgacatcaatttcacatccacatccatatccctccccccctcccccccccccacacacatattggctgagttctttcccccaactttcccaactcacctgcctcgtgttccgcgcgcacgcttttcaaactactaaatggtgcgttttttttgcaaaaagtttctatacaaaagttgcttaaaaaatcatattgatccaattttgaaaaaaaatagctaatacagtacttaattaatcatgcgctaatagactgctctgttttttccatgcgcaaatgggttcccaacacacacaaacgaacccaactatacaggagttggaattttacacctaggtgcatatgcaccagcaatctgcaccattcatttgcatgtgcggatctcaaagtaatgtacgcttagccccggtaaaatgtaccaatctagctttgtccccttatagtaaaagtagaggatgatacataatgcatttttttatgactgaaatgtccttcaagtagtactacagtgcaattcaatatgtagtttttgaatttcttttttgttgctgcatgattaattcatttcacatggatgctcagatcctgcaagcagtatgtcaatacacaatgatagatgtatcttcccttgttaaaaaatgatggtatatatcttcttgctaaaaaaatgacaggagtattattattttgagggaaggtcagaatttacagcaatatatggttacctttctaaacacgaaattcacacttttctgccatgtggagattatgatctgagtatagtgtgatgtatcttttgtataacgacacctgtgatataaactattactgtagtttgggatatgtatggtgtggaattgatcgatgaagaaaaaattgtgtacctttgttggcatcaaaattcggaatgtcatgagttaacgggttttagagatatataaaacttttagtgtttagttccatattatgttcttaatgatgtttagtgatacatcatttacaaacctatcattaagatttataacttttgttcattttaagataaaaaaacttgctaggagatatataatttgcaaatgtcattgtatatcttgaaaatgtagagaaattttgctattccaattgcaagggaattcttatttttgttttgggtcataccacagggtctttcttgtgtgtaccttcagagcgctttgtaatttatagcacgataaagtcccaacgcaattgtgtttctttttcctctaatcttcatctctggtttattccagtgaactgtgaattgggaccgtataaaccacagtccacattattctctatagattttaataaaattaaattttagcatgttggcaattagaaaggatgtcctatatgtacgtatgagttttacctatatattttatcgctagtgttttttgcaagttacatagacaagccacacctgcaaaattagatttttagcatgtaggagcagtgaagaaaatctaaatagcatatgaagtgaaaaaatcaggtaagaggggctagctgaggggcaaacctggaaggctatggtgaggctgagtgagaggttgaaagaataaaatatcacttcaagaataccagtagcattattagcacttgatctctctgtatgtatgcactatgcacgcatcttatgatgaaatgaacaaaaaaacaaattcctatgaaatgcacgcatcttatcattttaatggcccatggtacgtttgactaatcctcatgcatacacgtgattttggacaaggctaatggagtaggcgagcaactgttttcacattgggccatgctaacgacatctcaacaatataatttgtcctagctctatgtacttcatttatttactcttttggaacacatgatttgcacccaaaaaaaaagtaggattcaagtggcttagcacttcaaatactaaggtggggaaaaaaaaactttggaaaattgcatgaatgatcatttagggttcctttgaaaaaaaaatagaggatttttggagaattaaaatccgttggaaagttttcctacatgggactttggaaaaaaaggaatgtccctccccccaaatgctttaaaatccgtatggaatagttcatttcataggaattttggaggaaaactaacatgaggaaagacggtcccaaaactacaattcactcttttatttatttcaacaagctaaggcacagctgcatgaatacactatgcgtggtaaacggcaggcaactttactggaaactgttaggtcctcatcgtttggcttattaggaaataaaaataaatttgtagataaaacttttataaatgtgttcttcgtgacttaaaagccaatgttgaaaaagaaactacgttgaaaatatctcaaaattaagtttgaaaattcaaaatttggctttttctttggctgattaggccatccgatgagggccttagattttcatcttacaatttcaaaaatcaatcgtcaaagtagatatcaaaatccaccaggagatttactttttctccaaaaaataaaaggtgtcccaaaaaagaaaaaaaagggcttttcatcacacaactttcatctagatatcaagaactttctatcaggacagtttcaaaagacttgtaaaaagaaggtttttctgtctcacaactttcttctatctagaacaaatcatctgcaattctgtgtgctccatgactctaaaacacataaaactgatagcagtaatcccaatatgatcaattttatataggaatggttaggagttgtacagttgaatatatatatatatataaacagtatctgctgttggtctacctgacataaggttaatataattacacccactgagatggaaaggaacagggatgtctccaatactttggagttgagcatgtagtatatcactagaaacagcaattttatcgtcgccattcttccaaggttggtgtttccactccgatattcttcatatctcttatatttgctggttaacataaaatagtaaccttcagtcaccagtaatctcagagaacagaataaagacaggaaacaaactccagattcttttcgtcagctgacaaagcaggaagaattatagttgccaacaagagctgtggctgattattaacttattgtaacctaatacttgcaacttcgatgctaaattattgcacattgtgaatatatcacatattgaaactatatatttattcgtattgaataggattttacaagtttccctaccctttgattcctacatttgtaacgcattcaaactgtactaatatttatagaaataaaaggctaaatcacctgttgtccaacatagcatgcgatctgacaagcagctctagagaacgaatcaagtcactatgcaataagaatttgatggaaccataacatataaagagtctatcattaaatgagcttagctctctaggcctacgtgctattccagaatttcagtgtttacccagtaacatttacatcaccgaagacaaaatcgggtcgtgaacaaaatctggtatcttaaaatagagcacttaattggcatggaaagttgtcttttagtttgaaaaggtgcatctaccattaatctaaagtctaaacatgtcatgtccatgtcaaatcaccaagatcaagaagaggaagtgagaaaaatgattactcacacagatggatctctggcctagcagcagctgttgcatcaataatgactgtcactttctcatagtccaatgctacagcatcaaagactgtctgccggatgcaatttggtgtttgaacccctaaaaaaccataaacacttaagtaatgtgattctgagcaatgcggtagagatcctcaggcacaaaagaaaagtatcaatatttgtctgtaatgtactagactacaaaacagtactgtgcaagcattcaatttcgggacttttcaccacttcatatgatagtttttactgccattatatgtccacttagaacataaggatgttgaaaattgcaaagtgaataaagcgaaaaagaattgctacccttaaagaacaaacacaaaacaacaagaatttattgtcaagctaagaaaacaatgttcacctctgtctcgatagatggatatcagtgcttaccaacgataaccaatttctttattcctgaggttttgaggacagaatcaaggggtgtcgcaaagaaagcactgaaccttgtcttcaccaacttgtattccccttctttgataacaagcccatcagctagatcagcacctttcaaacctttcactgttgggcccttcccaccagaataatagcgtctccgaaaaatttcaacatctgctccagaagggtcatgctctctgaccacctacatgcagtcatcatcaaccaaggtctcagaactcaaaactatgaccacatgtaaatctattggcattaaaatccctacctggtgaagcaaaatgctttgcataggaagggggaaatgtagatcacattaatacaggttagctgctagttttgcaacacgtccaatgattatcataatagcatgtttagtaaaattcaaaattacatttaatgaaccatgaacatgtataagttgcagaagccaattcaaaagaaccaaattttagtttcatagtggaaaccgcacctagcaaattattcgctttgtagattttagaataatgtcgtgcagcgccaaacattaaacaacacacctaccttctgctatttagagatgaaatagagggagtcagtcacctaatccagcaaagcagcgaccctccaatatgaaaattggttttcatcagataaaaacaaatgtgtgtctactataccacataaactctgttctttgcatacactcatgcagaaaataatgcataatatctggtttgttgcctagaatatggttctaaatgacctgacagaacaagaaatcaaaagataacttctattcgtcaatcagtctacagagtgaggaaatgtgagcaaccattgcaattccacgccattaaacgttgaaatgctggcagatgctgcacctgcaaaccgaaacgacgagcaggatggtcaaaaaccaaaggaaatccacccacgaattttgatcccacactgctgcacatacattgcactgaaccaagaaatctgtggcacttgcttagagcaccacaggctacacaagattcctcctgaatccgaccacgaaattcgcagtcctcgtcgcattcaaccaaaccaagcaaccgagactaaacaaattattacacgaggacgaaatggagcttcactaatcaacaagaaccgagccaccccgcgagaggagagagagagaggggaaggaagcaagaagtgtacccagacgacgtagatgccgcgctccctcgcgacggcgaccgcctcggcgacggtggggaccaccgcctggccgccatccaccagcatcgggctccgcatcgccgggtcaacgaaatccttctgcaaatcccacatcaaccatcaccaacccaacatctccaaaagaaaccaagaaatttccccacacacacacacatacctgcatgtcgatgacgagcatggccgtctcgctccacttggcgccaccgccgcccgccgccgccgccgccatggatcgccgcgatttggacggggaagtcgagatcctcggggagagccagcgcttcttgaggtagtggaggaggaacttgtcgagggagaggagcagcaccagcaggcacgacatcaacgccagatgtgatgtcataaatcaatcccaacaacaaaaaaagaaaaagaaaaatatgatgccgatgcgatgctgcagataatatgactttgttttcatcccaaagctcactgtttgaaaaagaaaaggaacgaatttgtcaaaaaaatggattttcggaatgctgtggtggctcctgcagaattgtgaatctgggattctggatgggtttgaagtgagtgagattcagaggattgtggtggtttggttgggaggagttggtgagtggtagtccttggaggttggaccttgacgacttgaggagtaaggttttgacgtttgtagtgaaaaaaggatattcttttggaatttggtgtattatggtttgagatttgtttggaatgtatgagttgtttttggttggtgataacaaattttctttaaagaatttacatgttaccaaaattcggtcatcagatttgtttgtccattaatgtgccaagttattgcttattgtctttgtattgagcttttttgtatatgtgtgcagccgctttgacaactttggattatatttcaaagctaaatttgttttttgaagaataattttacaaaaaagtgacgaagaaacccctaaataaatactagatacaaattttaaaatttaaaatcagctttgtaatactataatccaatgttatgccaacaggctagaacttccgtcatgtgctgttaggcccactggtatccttgttagtacaatgataattgaaaacacacgtctttgtctgtcagtacctctgaaagatttaccatatgaagtgtgctaacaacaattgtttccagccaattctgaccagaaagacctccacaattgcagatgcaggcccgggcatccagctatcacttctttatgatacttcagaagttcagatgagcacaaaaggatggaactgcctaagatgaattatacttattttcttgaattacagcatccattcctgatctgtaaaaatttgtgcaacatgatttcacccgaaaggcgcctttctctaacccaacgagaataaactccatgctgattggtttactgtttctgtagttctctggctgaaaacatgatgctaagtgaggaacagatcaagactcaaggtgtgacaagattggagggcctattcatctctacctatcgatggctcgacctgaacaatgctacagaccagggggcttgagaaatgggatagggaagaggctctccacatcgacctgggtaccaacaacgttgttcacaatctcgtttgaaacagtcgtgcctttccaaccattgaaccaagggcctccaccaacttctagtgccgccatgttgcttgttgcgtcgagtatcatctgaaaacaactaggaatttttatacattgtagccttgttggtaatgcaccatataatcttgttacagttttttagagtaaataagaagagttttcttgatttggatcatggttacatgccttgatgactatcaatgaagtcggtcactatattctgttcaataaaagtgtctatactgaacagtgaccatgtatgtgcagaatcagaaattgatcccacaatgtgcttaggtaaaggctaaagagtgttattaaaatattttctagtatttgaatatggagagcctgacaggacagatagtatcatgcatatattatcatatatgaattaataaattttcagttgctccgggggcagataactatagaggccatcaatccatcagagttcattgtgtccttaactttcaatatttcctaaggcaaaatagtggcattaggttgtttggatccagggactaaacttgagtccctgtcacatcggatgtttggacactaatttagagtattaaacatagactacttacaaaactaattacataaatgagagctaattcgtgagacaatttttttaagcctaattaatccataattagcacatgtttactgtagcatcacataggctaatcatggattaattagggctaatagattcgtctcacgaattagtccagggttatgaaatgggttttgtcattagtctacgtttaatacttctaattagtgtccaaacatccgatatgacagagactaaaaattttagtcccatccaaacagccccaagctaatctagaaaaaaatagtattactacttccgtcccaaaagagttcgttttctctacacctatctagacaagtgcttgtccaaattcatgtataaactctttttggaacgaaggtagtagtggacttttgggccgcatactgatttgcatattatatgctacatctggccctccttgtgaattgcataataaagttcaattttcgaggcagctaacccaactggcaccttagattttgcaacaagagtaatagtgcaataatacatcagctatctgaaaaattctgatggccttattatcatgcatgcatacctttcccttgccaccatcatttctcttttcccacatttgcagcctcagatcaccatagcaggtgtctttgcatgctggcactagtccagcctccatggttggagctcgcaaagcagtgcctggttcttttgtggttgcttctatttcaacctgtagaaaagtagcaatgcatgttaagggtcgcattcaccaggtgctaggcactagtccggtgatagatcagctcctggcacttaattggatactaggccagcaggctgcctagcacctagataatctgcttttagaacattgaatgctaatcaaggaacatagaaccacataagtaaccttacaacctaagagaatctataatacaagtaagaaagctaagtgggaatcttgctcgaatgtgaacagtagccaactagcacaggcactgcattacattttcagcacgctggatgataattaccagatgatttttgttctcgccggacaacttccagtgaccccaaggggcaatgtcccagctcactgtcccggtccaaggcacaaattcatagaattttccctcataatgaattccaatctgcagggaacaaacagaactgttatgtatgtgcatagttaaattcgtaaatcttctgtctgatcattgtatgcttcctcttatgaaagttaatatgcagggcacaaagcaaacaagcatcgtattgaaattactggctaaagaaaatatatctattacctggtctcaataaatacatggttttgttgatgtggatgtgagtacaaaagcaaagcaagaaagtggataagaatgacgttggaccttctataaaagaggaagaatccataataacatcacagaaacaccacaggacatttaaaggaaacaaagcatgctgcacttctttttggaacaagagattattccaaccctgtctcaggctgcacacaagcttatgctgccaatgctttttactcaccctggtggcttttctgtacgttggttgtttcgactgtcagaggtctagatgtaaatgttctgtgggatgaaaagtcgcctagatacatacaattagtgtaactttcatgatacatacacaaaaaagatctaaacttaaaaccactgcggtaaaggggattctaatttgtggcataaccatcaccagcaatacatttatccactaaatccataaaatgttgtatcaatgaccagtcctgaaatgaaaataaacccatacttcggaaatggataagattttgtcagtcaaaatttttaggccaactggttgatcaataatattcccttttgccttactggcagtctggcagacatccagcaatcaagcttgcatgatgagctaagttgcagaacaaattagaagtatgcatcagattaaaagctgaaagtatcaggactctaccagtgaaggactttcataggtttcgcccaatccaattttccttaatccgccagcagccgttaatgcaacttcaccagatgcgcctgagaagacattgcactggacctgtatgagcaaaggtgttcaatcagttagtttggtcattcatgtgaagttttgagtcaaactaaaacatactctctccattcacgtttacttgtcacttttaaccatggcacataaatttgtgtaatcatttgttttcatgttaaatgaccatattaccctccacaactaactagataattaatatggataaaattggaaaatgtgcattacgaaacgtgaagcgacaagtatttgtaaactagctatatcatgaatatttaaaagtgcataacctctataactatgactaaatgtaccagtaaaattgactactttcaaccgaccacactatgtttaaagaaggtattttttatcatgaccactacaaccatcatattgcatgccattcttgaaaccttcatgcatattgggtttgttcagaaccttcacccagcttcctttgataaagagatgcaggatgagatgcaagccaaacattgccctgtgagcaaggaactaacaatatccttgctcaatgaggtgagattgccaggcaaagcaagcatttttgttgttactggaggcctaaactcttaaatccaggtgaggcaagggatctaaacagcccaaaagctactacgggtgaacattactggcaacacaaaacacagaattacagcaagaaacagcatattttctatctgtaaatgaagcaaaacttattcagtattccagtgtatccattacatcaggattaatggtcagaaagaagatagaaaaacgcacccaataccacttcctcggaaaacctgcaccccagttcttttctgaataagaaggagcattttcaaattcaaaccgctctccgtcccattcaatccatcctgagtagttaagttgcagaagttagtattgaactattaacttaatattattataaccttcctaacactatatcatatcacctcaatcaatcgtgcgctactacaggactgaactggagaaatcatactgaatggaataaaaggattggacatatagataggactagccacatttcctggtattttttagtgcaatttggattcctacagaaatattaaagaaaaaatttgaaataaagcttcatcaatggaaaaccaattttcacattttaggctaagaaatacaactccatcgtacatgatagttttacacatgagagatgaatgtatcattcagtaaattactcagtggcacatgtgccatctacctagaatgaaaaccagtaggtaaaaagaaaaattaaatatctctctgttcagtttatcaaatacaaagaaatacaaacctgtggataagccaccagccatgcatatttgccaatgaggttcaaagaaaggaaaagcagcaagccaaccagcagttgatttctgctttgacgtgacatcaccccagccatatactggtcgagtgctgtactcccacctagctgtttggacatttggcacatactttgacctgacaggggagcaacaggtaatttaaattttaattgttcatttaatagcaataaagtgtaaactctcttttctactcaatccccatttacattttgaagggaaacattaattacggtattgtatccagtcctgacataaactgctaggagttgttctctaggatttgcatgtaatataagcatcatcatagtagtaataaacacattgcataacattactaaataaatctaaaagcattgtcaaggtctttttttttcttataatatgtaacattcgatacaatcaaaccatccagagcaattttcttaattacctgcaatcgtggttacacacgaactactgttttttcctaaaaaaaatttatattaagttaagtgcaatgtatgagcaaagatggtgtcgcatcacctttcctctctacagttgaatttgctattagaaatgtgtttgggcacaatatatagttcaagaaatttggagcacctaaaggatagaaacttctatatccctctctgacaaggcaataagcgtatcaagtgtgttgtctttcatgaacttcaaaagtgacagcgaaagagctatgttcattttatcattttacggtaaatttcacaaaacagcaattatatggttaaaactatcactttgctgcaactttagcaacatatttcacaaaattgcaacaatagcaaacgattttatcagaaagctacaactttatccccctatgtgtttatgacatgtgggcccaacttgcaggagcatgagtatggtatatgtgtatagcatgttggtccaaacttgtcaagcaaataaagttgtagttctatgataaaatcataaaatgtagttgcagttctctgaaatgcctagctaaagttgtagcaaattaatagttttgacaaatagttttagttttctaaaatttactcatcattttgtcttgtcatattttcaattgcataaatgcataattccattttacagattaggaaatccatctgcctgatttcaaaattcagattggcagaaaatcctgccatcatggtattcgaaggatactaatatctattatccttttgtacaaacaagcaaaccttcctctccaaatagtttcgtactaagcagatatttcaaattttgtacatgattctacaatattatattttgattgaccagaatacaattctcaggttatttcatttagcattgtgttgatgagctaaaaataaataaattctcaacatgcagatccaactattctttatagttcagctatggaaagaagcatttcgcactaaattggcaaaaaaaaaagctcagtaagtaaactgtaatgacttttcaataaaacatagaaacataataatagttacaagaatagatcttagataaacatcaagatgcacatgccttccatcatcacgtataaagccttgatgccaaatcggtgtcacttggaagccttccaaaactcgactagaaaattcctaatgaaacataataaccgttgattacttgaagaaagccattggcatgtaaagcaatgtagagagtgataagttacaaatcagaggaaatatcagggtaaacagaataatagataagacatctcattatttagtaaaaaacttgcacgctgagaaaggatcaaagcttacaagaatgtatactgcgaatctcccttacaggcacaccagttactaaataaacatttttttacttgaattctttaatacagaagcactgcacagtatggacaaggaacgttcacaataagcagcacccctaaacaactagatgatgttaagtatatgcattttagtacatacattaatatttattattaatattgctaggtgaaatttaatcttgttattgaaaagaaaaatcatgcacattaggtagttggtgaaataatcatatataattctaatgcataaagaaccaaccatgctagatatgaaaggtagtcagttataaccacaaattaaacaagaaaactaagattttttaatgaattcactggatatcaaatagatgtggagtagctcagggaatggcatttaaaatatgttaataggaaaaaatgttaagtcgagaatagttgcagatcattatatgagtttttgcaattcataagaatccataaagaatctacctgagggggaacctccccttctgggggtgttgaaccattattgggaatgaaagtgtttccgagcattagttcatgcctacctatcgaaatgcagcttattaatttggaaatcaacatactgtgatgcactactaaagttccatatgaacaggaaaaacaataccaactacaaataacagaagcatgaagtaatcaatatctgcactgcatcttagtttgcattgttctgacttttgatctgcagttttgtttactactttttacctttatagatgcatggaatgcacactacatccaaaacaaataagactcctaagaatatatgcacttgaactgtttgggaagatgtaggatgagtatgaaagtacaagtatgtccgtcaaaagaacaacatgatttcaaattagttctgatcttattaggttttgcgaatataaaccaataggaattgttgtcaaattgacatcttagttaactttgataatgacagaaggctgtaaagtagtaattgttaggtatccctaactaataaccacttgttaagcacattaactagattcggcagcacaacactattatcaagactggaaccaacttattggtcagaacaggtttgtgatgagctacacaggtacacatctatatctttttcgagaactagaccacaaggtctttctaatataagcccctgttgttatcaacatatttttcacaatataattccctgttgttataaacatatttttttcacaaatttatttcctcaaatcaatctctaatatgaagaaagcttgcttttacaaaatagttgattaggtctcatctcaaaaaggctgattagaaattctaaaggtgcgtgaaagaggacatgttgcatacttgcatcgtactaagcaacctcttccgttgcaaattcaggtgatggttcagaataaagctctgtgacaagcttcttttcatcaatctgcaccagacaagaaggatggaagggaaatgcaacaagttcgttgagttcagttaaccatgaaagagcggctatgatttcaggcgtttggttggtattgttttgtactagttgttaataaccttcttctattcttgctttattaaatatcttacagtcagctcgttaggattttgcgcagaacagagagctgattgttagcgcgaatatgtattcctttcaccattgaatggaaataaaaatatcctagatgaaatgtctttgagggtgaatgtgaaaaagactggatctagaaaaagtagcttacttccccaaaagttattggatttctcggtgaactggcatatgtacttatcatcggcgccaagaatctgcgccccgacgccagtgaagcgcgaaccatgtatgacccgatccagatcactcatcccatctcggaacaacgggttctcgacagagtacatgaagcagaagctctgcctgcactcgggaatggacaccttgaagtaccatccctcaaagaagggcctcgccgtgccgtcatagtgatacctgacagcatcatcccatcacatcatttcaattaggcatactgaatctcaaacatgcatgatgttaaaaggattgccgaagaatccgagctaaagcaggaatccaaactgaatcctacatttctgaatcagaatcgagggtatgatgatcagtctccgggcgacggcttacccgctgtgcggcgtccgcagggcccggtcccgcggcgtgggggcgtagacgggcgccgccaccgccgtggagggggagggggaggaggaggccgcgcgcggagcgagggcgcggcggtggcggcgtggggcgcagcggcgcggcgggggagcagggcgtgggaaggagacggccacggcggcggcggcgaggtccatgctgatgctgcgggcgggcagcagctgacgcgaagtgtgcgggcaggggacctcgatcgatcggtgtgggctgtggaggtagaggtagtgggggcccaccaatcagggcagttgtgctgcttacgtggcgggccgtggtccatgtgattgggatgggacttgggggttgagggctccacgtctctaatgtttgcctccggcccgccgccctgttggctggatctcacgtcgtcacgtgtcaccgagctacaaacggcagataaggctgtgtttagtttcacgttaaaattagaagtttgaaaaaattagaacaatgtaacggaaaagttcgaagtttgtgtgtagtaaagttcgatgtgatggaaaagttgaaaatttgaagaaaaaagttggaatctaaacaggacccaaggctgattttgctactacctccaatccgtcccaaaatgtacgacaaatctagaccctccgttatgtactccctctgtcttagaatatagcaatttaagatacgatgagtcccattctaggacaatgtatctggacattatctcatcccatacaaagttgttatattatgggacggaggtagtatattcattgtttaaagataagtcaaatcttatcgtacttagcaacattctttagagatattaacaatttatttaaaacaatccacataaaacagtgcaaaactttgtattgatataacaaaaaaaattacaagatcatactcccgagagactacgtaagggaaaaaaataagccaagccacgtcacgcgtctacaacaagtcatcactgttgaggagcaggccacgacacccccccccccacaatcccataaccatccacgcctttgtgttgaaggggaaaacagtgagagaaaagatggaatcttctccccctcaccaccccatctagcatggccaacttatactaactaggtgtcaccgcaagagacaaattgtctagaaaatagcttagaagaaaatgggtatccaaacaatgtctccagggaggttaagacaccgaggatgcctacgtcacccttcctgagatattaggatgtagttttcgcccgaaagattccatcagaaagagaagggaagaaaccacgacaacaaccccagaagggttgtgacgcccagcagtgccgctgttgccggcctcgaatatgttgggctttcaccgggactcttcctatcttctctatcaaggtgtgcatgtcactagtagctaccaccatctaaacaccttcaacgcgtagccaccacaccagtgctcattatcggtcggccaataggtaggagctcgacattccgatatgctccacttcatccacgtctttgagttgcagaagtagagggtgagagagaagagtggatccgctcttcccagtataagcctgccaacgtggccatcttgtagtggctagccgctgcctcaagagggcatgtgtctggagaagagtttgcttcatgccacctaacgcccacctctgcacaccatcatcatcgtcgtcatctcaggagtcaggccgtcggccaaagccacgaccccctcaccagcgcgccaccgtctaccccatctctgtctactgcagcatagggcgacgcaccattgtgtgtcctccactacgacccaagctgttgcgatcacacctaccagcgtcatcgaatgccaggccagccaagcccgttgtcgacccgcttgccatcgagcaacccacgcctatggtcgtgcatccaacaccaggctggcatagcccacttgccaccaacaacgatgattgccacattgtcactgccatagtccgctgcccaagggttcaacaagccaccgcgaccccccaatctaatccctcgtcagagtgacagcagatctaggcaggaggatcatgttggatctagccaatgccacatctagtcgtccctgaaaccgccggagcaatagaagccgccatcactgcacctccacccaacctagccgcagcggttgctgttgaggtacagtatccatgctagctccgcctctacggccaccatcgctgcttgcatgtcatcgtcaccgcaacctccatggacttcaaagaggaggaagaagaccccaccgacaccatccttataaccacacctccactactacaaaaaccatctttcgtggcggccattttgggttttcactggcggaatttggagccgccacaaagcaaaggccagtgaaaatcaagatcttcactagcggttatcgaccgctagcgaaaaaacattttcgttggtggttgtcttaagccagccgccagcaaagatccattttcactggcggctggtttaagatggccggcagcgaaaatgttttttcgctggcggttacactataccagccgccagagaaaatactaaccaagtttaaaaaaaaacgacggacggagcgaacgctccgtccgcctccgcctccgcctccgtcaacggtccatccacccaagcatgagcatcacaaaaatcaacttaacaaaaatttaaatcattagcgcgcggctgcagtatggcatcaaccaccctaatccattcacacatcacaaattcaccccaaatctcataatacattcaacagattcattcacaaatcacaaattcaccacaaagtaacacatccattcacaaatcacaataaaataccaaaaaaatccatccactattctctacaaaaaatccacttgcctcaaggatggcagccacgtcgagccgtgaagaggacgatgacggggaggatgccaccacctccgccttgccacagccactacagtgccgtgccgcagcctccatcatggcccgtgcgccaaatctgagagagggagagagagtggtggcggcggggaaggggagggaggagtgggggagagagacctagggaggcgggccacctcgatccgcatgctcctccgctccagatgtggtcctgtcgccagatccaccgcgagctgctcgggcgccaccgcctcgggcgccgccaccacgcgccgtcacgatcccgccaccggtcgtcttcccgctccccccgccgccaccagagctactgctgcagggctcgccgccactgctagtggggagtgaaggggaggagacggagaggtgggtggagaggacagatgaagcggtgggtggagagaagacatgaagtggttttaaaatcatatggcaagggtaaaaaaacgcttgaaaaactttttttttctggcagaggagtttagtagccgccagcaaaaacacgatttttccaagaggacgcttaagaggtccgtctcgaaaaatagagtttttttttatggcggatctcttagcgtggctgccagcgaaaatagatttttgcaggcagtccgcagccccccatccctcgttacatttttgctggtggttttcgcgtatggccgccagcgaaaattatagggtgacgccatgaaaaatcgtttttctagtagtgctttctctggcgagctactcaggcggcagtgaggtagggaaagggttaacgtgtggtggcggcgcggcgtcttggttgttgctcgagccatccccttggagcgacgcaggggcagagctcgctgaactacagaactatgggtgtataagtcttgctgtaaatttatttaataatgaatatgaatcttgcctctatccacacatagctaaaagttacacatattactccagtattttagactccacatcttacaatcatgaacatcaaaatacaaagagaaaaactactcgtttcgttcagaaaatatcaacctgtagaagcccaaagtaaatttagtactagtaaaaaaggaccaaaatatcgtcggttaaagtatatccaatcattagtacttttttcaataagacttactacgggacactaaaaaagtgcagtctttacttccagacaatataagaatatgaattttcctaaggacacttaaaaaatgtggtaatttaccacagaacacaggtacattataatacaacatccacccaattgaagacagaaaaaccacgaaatatatcgatgttttctttatcttcttcgctctaatcttcctaaaatggataccatcatggtggagctatcgtgggcctctgcgtcatgaatcatgactaagtgcccttagtcggtgatgacgaagcacccaagacatagcagccaggagtcaccactacactgttgtggcccttgggattgcgacaaagtacttcgagcgcaacagttggcggtcatcaccataccatcataggcgatttggcctatccctcggccagatcagccatcatcggatccactgttacccattcttctcctaccaggatctagcatagttcatcctcctcatcgtcctccaatacacgtcatcgtcagcagtcgattgagtgagcttccctaaacccaggcagcttggtaacgactaacaacatatcatcttagctagttggttgtaattattctatttactatgcccttcatcccaaaataagtttatttttcacccataccatacatgccaatataaaaccaagaggactggaataccccaactttatcaaatctcaatgtacttattcctctctttatctattctcaatatatttattcctttactttcacaaactctgatgaagtgattgctaagggccattcgagacgcaggattgagaaaagataggaaaagaaaaacatatgaataggatgtcatactcattggattccaacaggattttgaaacacatgaaacttttaaaatattatttgaagagcacataggaaaacacatagtaattttagacatacgaagaggaaaacatgaggtgagacctcatgcttattttccttcaaacttgttctagaatgatccattccatagtaatttcaaaggaatgggtatgaaacaatcacttgtttcaaaagatttcataggattatttcccataggataaaatcctctagaatttatatgcttttctttgttttaaagagatcctaaaataatttattttcagacaaacaaagatgaaaaaattatcaatcgtttgttccagcttgctatgcttgttgagaaagagtcgcaggaataccaacaaaagaactagatcaatattggcaactccctcatgtcaagaacatcgaccacgactagacaagctaagttgtcaacaagctttcataccgtgcatccaccagcgagcacacgaccttcttccaccgctggagcaatgctatcaccgccacctactacacgagttttggattctagtactaacattttgtagatatctgtggatgaccaaggtaatatggaagagaagaaaggcgcgcaaaaagtaggtctactcgttgctccatgcatgcttcaagaaagttaagttgagcaagcgtctacagtttctgaacatgaaaacaaaggtaatgataatggtgctacatttactcaaggtatgcatagatatgatgcgccaaatatgtccactacttatactagattagagaaacccatatggaaataattactcaagacatgatgcagatatgaaaatagttaaatttttatgtgctaatgacattccatttaatgtattgagaagcccacaatttgctggaatggtcacagccattaacaaagcttctagtggatacaaaggtccatcctctgagaaggcaaggacaacttagctagatgcatgcaaaagaagcgtagaacatgatttggcaatagtcaaaagtacatggtaattttcagttgctaacctttttcatccttgtacaggtgcaaatttgttaaccttttaactgaatattgagttattgactatcacttctcttatttttgcatcaagcaggtgcacacaaggtgtttctgttgtgtctgatggatagactgatataaagaacaagccactgatcaatgtgattgcatctaatacccgaggttcatgctttctatatgcagaagatttctctagagttgaaaaaaacaggggaagctattgcagagttcttattgaaggctattgatgaaattggaccaagaaatgtccttcaagtaataacagacaatgtatctaacaaatataggaacacgatcctctagcatggtatactgtttgttggtatttcttaatgacattactagaaatataattctcagcaatagcgcaaaaatacttctgatatattatggttacagagttcatccgcaagcacacagatataccattgtagcatttcactcgagagtattccaagggtaccgtatttgcttaatcccgtgggaagattatgataaagagaatcgtactaataatttatatattacttgtaataaccaaagtctaggtagtggttaatataattcaaagggtagagtgacactaagcagaagcatttatactcattcataattatctaagctaagtggaaagaaaatagaaaaattatattcctatacttctagtacacataggtggtgtttgaatctcctgaagatgaagattaagtgtttcacgcaaaacgaagtggtaatagcgtgtgattaattgagttttaattattataaacttgaaaaatggattaatctgatattttagaacaattttcatatagaaaatttcgcacgaaacgaaccaattagcagtttgaaaagtgtgccactttaatccaaaatttaatcacactttccaagacattcgaatggggccaaatacaaacatcctagttatatgattacttagctaataccctctttccgatatcctcctggtgcttcgagaagccactcttgattgccgagttccttatgacaatccgtcatgaccattcaactggggctaaatacggaggagtaccctccccaggaaattaactttggactacatatacgcgcggaggaatacccgtactgagctatcaccatcagcggcccacctcgcttacgtagcatataaccccaaataatgatatccagtaatctaaacaccacgcttaaactaccgaatactactttaatatcatcatgatgacatagagtcatcgtaaatacgatcattatacccacaccattgcatctcccagataagctaacatcataataaatataacttggatatataataaagttggtatttgtatacttggaaagtaatacaataccaaagtagtataaagaagaatattccaaataaagtacaagtcttacaaaagaaggaaaagctactagagccatacacgaattcgtccgaagactccgaggactgaagattctattctatttctattccactatactatagagactatactaaacttgagagatgaatgaagcttcttgcttgaggtgtgtcttgaaatggagaatgaagctccttttatagcctcctaatgacggttgtgacggttggaatggtcggaaataccctccaactgtcattgggagctaatctacaccgcccaggcaaagccctagatcaaacggctgcgagggggattcggccgaaccaggttttggctggtggcctcctctcttgctcccatatgccgacttgtgaattttggcctaattggtcgtgtcatttctgagttcttggcctattcattgataaatctgattctcgacattgtccgattgattgatcgtctattttgatgttgattctccttcattttatgttcattctctgcaagaggttagtaatcctaatgctagtggaatatttattaattaaacacaaatatgcattacaaccatggctagttctcttttatttggatagtattgacgggcaaaactgatcactaacgaccgtcaacaccatttcgaacaaccatggaacatattccatctatggttccgtagagttccagattgtcgttccaaaaaattaagctaggaacacgttccacctatagttccgaaattttggaagaggtatactcctctagttccatgcttttggaaaatggcatcccacgttccacgttccagttcctcgttccatcgatccatgaacttttgagacttaggtttagccaaaatttggatgaaacaaacttgtaatgttgattattcaacctagtagtcatgctgcctattgggaccataccttgaccaaatatgctctaccgaatctttcttcaaagcgtagtgcgtacctcgatcttgtacacgttgatcatgttggaggactgatgtcggatggggtcccgatcttctgataggtaatttatcttcccataaccagaaaaaaaaaatcattcatcctttgagtatgttttcagagtgcagagttgtgcattgattcatatctagtccttactgttgtcaggtgcttacttgagctagagttgagtctaggctaggccagcacattgactagtactttgaactattattcaattttgcattttttgattagcacaattgtgttcctctgctactatatattgtgcctcccaagctccacatatatacttctggtgagcaccactttgatccttgcaatcgccacatcacgtccttcaaggtgtcacaaaccagccaccggatgtaccgtccttagcactgctggtaaggcacttgtaagagcttgataaggtgctccatttggctgagttgttgagaggcaccactacaccacatagcagattattagggataaccttcactgtttgttgttgtttttgtgtttgcaatcacatgtatgggtggcgctcaaaatcagcgataccaacaaggtgacaataatcgcgtgcccgatgatccttattctaaggttaagtttaaaataccatccttttcgggttattatgatgctgagaaatactttgattgggatatgacagtagagcaaaagtttagtgcccaccttgtgcctgagcaacatagagttcgacaagccagtagtgagttcaaagagtttgcttatatttggtggtctgggttagctgtagagagagctttacctactacttggaaagaacttaaggtagctatacgtgatagatttgttccaccatcttatcttagagaattaagcaagaaactgatgcgtttagaagaagggaataaatctgtacaggattactatggtgagctacaaaagggattgatgcgatgtagcatagtggatggaactaaggattccatttgtcgcttttacatgggattgaggcgcgagattcaggacatagtagataataaggaatttaacactgtcaaccagttgtttcagtttgctatgcttgcagagaaggaattgcaggggcgtaatcaacaagtcaagaacaaggcgagcatgtacacgctgcgggcgaagccatcttcggggctgcccaagcccatctctttctggacgaccccactagcgagcaagcgaccaattgcacccggagtttctgcagcgccaaaaccacctcacccacgacctgcagattcaggtaaaggttcttcgcaggtatccaataagagtgcctcatctgtcacttcgacgggacgcacgcccaggattcagtgccaccgctgccatggatttggccatgtgtagaaggtttgcctaagtcaacgggcatacgttgctacggaagatggctacaccagcacctccgacgttgaagatgatgaggaggaagagaagaaagacgaagagaaaaaaacctatctatagctccatgcatgcttgaagaatgttcaattggacaagcacctataatttgtgaagatgagaataaatgtaatgataatggtgctacaactaatcaaggtatgcatatttatgatgtaccaactatatccagtacttgtgctacattagagcaacccatagtggaaacgattgttgaaatacctttgtcacaaaacaatttgcttgatgtttcttgtgataaagaagagttgtgcgatgcttcacttatatccatgccacaactagtgaatgaacatgttggttctatagtaaagccaccatgtgttgagtttaaacatgttattcatattgctagcgagaatgaagagcttaaactgctatcttctttgaatacttggggttatattcaatttgatgatctttgtccactcaactgtttagagaagaaattatttgctagatttgaattgccatgtccttcttatgtgattttacatattattagcaattatgatagtaaaggagaataaaatgtgcatcgagtatatatttgttcgaatttgactatacctccttttcatgataaaatgtattttctagaggaccgcatgcgtataagtaattctctttctagttcctctagttgtttaaatgagttacaagttaatttgcaagaaagggagtgttggggtttttcgactacaaagattttagaatccaaccatatggccatcaagaaatgttcctcaccggatgttgtgatagataaagataagttcaatacgctccatgacaaggtgaaaccgaggacggtttccaatcaagaaagggaggatgatgaggacacaacaagctcggatataaccatgactaacttatgtattaatcaaccaaaggtgcatatgttttatattagatttacttgtcatatatttgaacaaatgttgctacacaatgagttttgtgtgttttcgtttgcaaagttacttgcttgggcaaaagaaaagagaccgagcgtaaggaatgcatggatgattgaagaagttgattggggaccaaaccaagaccttctctaagttttctttcatctcaccacgtcacttttggtccatagaagacaagagataaagtcgtacaggttttgaatttggattcgggcctcctgacagcatcaacttcaaacggacatagtcgcttatctagaaggaatttcagggcccatgagtacttgttggaaatcttatggaatctactttcagatggttttggtctcacgtcaaaattcctaccgagctgccgggaatctgcaaaaaaagccacgtatctcatccagtccgaatctgatttaggttttgggccttgtaattgtgccgtgggcttagcccaagggggtgtgcgccctagagcaaccctaggacgtccctaatcatacttaatcagtagccgtcatcgtttagtgtcgggttttgcttagattaaactgtcaagaacttttttgatgctagatcggtttgtggaaccccaaattcgagtgcttaatcattcatatgcaattgtgttgcaatttatcttgttcatacttgtgttcttcgattcgcatgcagggattaaccttctcggcgaggtcaaccgggtttcggcacggttgataaccagaggagacgtggtgctacaattgcagggctcagtagcgtgttcgttcagaacccggatcgagttgtgccgcgactccgcccaaatcgattgtttatctatacctatcggaagatcgggaccacgcattcctcttgtctcttgtctcttgtcttctatggaccaaaagtaacgtggtgagatgaaagaagacttggagaagatcttggtttggtccccaatcaacttcttcaatcatccatgcatttcttacgttcggtctcttttctttcgcccaagcaagtacctctggaaatgaaaacacacaaaactcattgtgtagcaacatttgtttaaatatataacaagtaaatctaatatagaacatatgcaccttttggttgattaatacataaggtagtcatgcttatatctgagctagttgtgtcctcatcaaggacagcctcaaattcatccagtgcaccttaattatactcgggttcgtcaacctcgaactctccattgttgtcattatgatcaaagggtgggagatctctctcatcttcaagaatcatgttgtgcaatatgatacaagccatcatgatcaatccaatgccacctatttcccacaatcgacaaggcacaacaaccaccctaaaacacgccttcaggatgtcgaaggcacactcaatgtattttcttgttgactcttggtgagctgcaaacaactggtctttgtgactttgcggtaacttattgttataattagcgtcacccatttgggataaattccattagctaagtagtaaccatactcaaattgatacccattaactgtgtacctcaccctaggagctgtcccaaatatcattttggtgaagatgggtgactaattgagcatgtttatatcattgttagaaccagcgacaccaaagaatgcatgacaaatccatctatcatatgatgctatgccttatcttgcaacgccataatcccctgatatacattcctttccaaccattgggacaattctgccacctccaatgcattcagtcaatacttccaagcattccaggaaatccctcgacctcatgcaagacaattctgccacctccaatgcattcagtcaatacttccaagcattccaggaaatccctcggcctcatgcatctggagaagctgccaggaaatccctcggcctcatgcatctggagaagccgctcagtgttcaccactgtatgtcttcacttccaagcattccaggaaatccctcagcctcatgcatctggagaagccactcagtgttctccactgtatgtcttttcaagtatcagtcaccaaatatttcaataacccctcatagaattttttgagatacactagtgaagttgaagctgcaattcttacatactcatcttgttggtcagcacaaaaagcatatgctaacatacgcataactgcagtacatttctataagggtgaatgtcctggccggccaagtacattaagacgatgtgtgaagtatgaagtggctcaacaatacgaaggaacaatggctttctcatgcgaaaatgatgacgaaagttctcttcattgtacactggattatcctgttggtatttcttatgaccacaaataaatccgcaagcacacgaaataccactgttgcacttcaccttcgggtgaccccaaaaggatttcgaactcagggaacatgtataatctacctaaggctaagacaatccaaggacaacaactattggtaggctagctaggctaaagaggactttctatgtgttttaattatttaagctaagtaaaggtaatttcctatctgctgcttcgggcaccgacccttgctagtctgccagcatggttccggctatagctctatgatgcatccgaacgtggaggattactaggataggattcagggctgtcaccaactgtcgtttacctctgacaaatccatgggatacacaataaacaaaggtaatctctaacctagacaccatgcctaagttattaattactaatctaatacttgtgcagaaacttccttctttatccagagtctagtattggagcactcagtacgaatactaaacaatgaacccgcaaatatgaaaatctatcttagactaaataattaaataacataagaaaagatcccgagcagagtgtaccgacagctccggtactcctccagaattcctcctagaaagctacacccattgaggtagaagtcggagatagcgccaaacttccgggcactcctccagagcttcccttcaccctctacctattttctaatgtacaaaagatacaatagagcctcttataattcagctcaaagttgtgtgtgttgtgaagtgaagtgagcttctccttttatagcctccatatgatggttacaactatgggaattgtccaaaacaccctccaaccgtcattgggaataaatcaagagcgtaaacgtggaagatggcgatcaacggcctcagaacaggtttggccgaacccaaaaacccacattctggccactcctttggctgggaggttgttaatgggcccccaacatcatgtactatgatttggcccaattataagtggttttgattgacatatgggccctccaatccatgtaaatgtgtcctgattgtccggaggtgtattttgtcgtatgacggacgtgttttctccttaatatacctgcattcaaatatttcaccaacactagtggaaatgattaggaataatccctaccactaagttggataccatattttatttcattatatacaagtattgatggtcagatattatgatttaagaatcgtcaacagtatgatatttccttccattgccctcaatgggatcagtggaattgttgagccaagcactaaccaacaattcaatgtagtggggtaaacatactagtttcactcaccttaatatcatcttcatttaaataaaatggaacaaatgtaatctcagcaagaaactcaatagcacataaattgcataaacccttttacagaagtttcggcaccctaaataagtaactaaatttaaaaccaatcaatactcacagttaacaattctataaaaatatcccaactcactaacatcatcatatcaaactaatccatctcagtaccatcatcatatctatcatctacaaactccaaaaatcatcatcattgaagtaatcaaactaactcactaacaaataacaaataaaccaatgatactcatccaccacatgtacaacattcacaaataattgacttaaccaaccaattattcacccatcacagcagtagcatcatcaatacataaaccaaaataaataggatgaaacaaaaattctcaccagccttaggtcctcatcatgtgtgtagtagagtttgaccctcccgtcatcaccagcttggggtgggggatctggaattggcagctagggatttggcacttggggttgggaatttgctgaaaccctatggtgctggcaagatcttgagccccttgtgctgctgcccgtgaatccactactagaggtggagggggttgagtgcagaatgcaggaaactgtgaatgagcataggggaacatgaactggggatggacaaaggcaggttggctcgaagatttgccaagattggtgaccagatctgggtcattgaacatgttggggaagccagtgggaggattcggatccatgtcgacctgcaaacagattgttcttagaaccgcaaaggaaaaccaaatcaacaaacaaaaatgggggtggcgactagggtgtacagacctagggttcaggataaaaagaactaacctttttgggggttttctctgatggggctcgacgaggctcgccgcgacctacgggaatgcctgcgaatgatggccgacgatgaccgacggtgcgtcgcacggcgaggtgaaccgaggcagaaagagaggggcaaaccggccgagcgaatggcgagaggggcaagagcgacaagcttgtacccctgtggattgagagaggggggaccgctccaacaacgcgaggaatcgacctacacaacgcggtgcccagacccaaagctttgcctcgcatcaactccccgcgcagaggtgcgcgcacgtgcagaaggtccacgcctccctacgggcgcgtgctcctcgacgctttttggcggatggtctaatgtggagggctgggggtgcggtccacgtccccgtgtcggccatgccctaacaggctcaatgacaagatgaaaccgatgacggtttctaatcaagaaagggaggatgataaggacaacactagctcggatatgaccatagctaccttatgtattcatcaagcaaaggtgcctgctttctatgtgagatttacgcgttacatattgcactatgagttttgtgtgttctcgtttgcaaaggtacttgcttgggtaaagggaaagagaccgagcgcaaggaagaaatgaacgatcatagaggttgattgggaaccaaaccaagaccttccacaagtctactccaatattatcagatcacttttgctccatagaagtcaagagatgaagttcatgcatatcttagattcggattcgggtctcccggcagcatcaacttcaaacggacatagcagctgatccagaaggattctcaaggtacatgagtacttgttagaaattttatggaatctactttcacatggtttttgtctcacgacaaaattccttctttgctgtcgaaaatctacaaaacaagccatgtacatcatccaattcgagtctgatttgggtcttgtgccttataattatgtcatgagctaagcccaaagagttgtgcaccttagggcgaccctaagaatatttattcagtagccatcatagtttagaataagattttgcttagattatttctatcattgcagtttcgttgctagtttgatttgtgtaatgccaactttgagatcttaactattcatcttcagattgagttacaatctaccttgttcttacttatgttcttcaattcgcgtgcaaggattagtcttttcggtaaggtcaatgtttcagcacggttgataaccagaggagacatggtgttgtgattgcagggcaggatcgtgtctgtcaagtttccgctaaattaagagttatcaatacctatcgaaaaatcgggacctagttcctcaaatggggagggaggagaaaagggtatatgtatctatgaattgaggagcatcactgtatagtacaggaaaagcacataccggagtggcgatttttcggcaactacacaacaaatttccagtagtgtatttctaaaaaaagatgagagcagagtttaataaattggaattttatcaaatttttttcctgaaaagggaacgggccagtctcgcaagatgaaaccatttagactttattacagcaagcaataaattaaaacgtagatacacatgcatgcattacacattcatgaccattattttcgtgaacaagcaaggtgacatgcatgcattcaccaagataaaagacttaaattacaagggtgttactgatgtttgatgatcaacaccaagctatagcaagcataggtgcgctctggcagctgtctacaacttaacccttcttcattcttccagtgcataataatccattaatccacccaaagagatcaatctctagctagacaagagccacacacacacacacacacactaccagttatatactctgttgttgcacccatcaaaccatgagcatacacgtgcatagcatcaagaggaaccagccttttcagcaggatggctgctcctgatgttatgcagctaattaacccaaatgcaagcatgcatgcatgtgatgtaatatgtaagatatgatctctatatttccattgattcttcagctagcttaattagccagccgagccagccatttcattggccatggcgcccacagagatcaccggaccatgcatcgatctagcggccgaaccctatgccgaaagccggcggcgccgcccagtagtccgccgggccggcgtcgacgccgacgtccaccgtgcagctcaccggaaccaggcacaggcccctgctcctcagatccatcgtcttcgcttcctcacagctttcatcctgattaattaattaattaatcgagttaattattgtcacacaaaattatcgtaggcaccatttagtattttacaattattttgctaaattatgtatacttgtaatttacatgaaatttaaatcgatgagagtacatgtatcgttctaagggatgaggactcacttgatcaggctgtcctctctttttcacggcattgtcatgtaggagctgctcgtacaatggaaccacacataaagagggtgttgtattagttattaagtgattaatcaaagctaagtttgcagtgatagttattaaaggtgtaaagctagagacaaagtactggccccatgattaactttccaggatgcttttatggaccaattaaagcaaagctttagacaaactaaaagcccctttgggaacaaaaggatcatcttttgtgctttacttaactgatcagctgggtatagatcccataaaggaaaaatgactaattgatcgaataattcattagttacttaatacctggccagggtcttctggaaatatgctgttcctttctccttgcacctataaaattaaacagcaattaaagggaatcaaacagctagcttttttatcgaccagcatatatatactcatttggttcgtcaggcataaagtttctgtcaatacttttatcgaaagatctcacagagatacgatgctctgaataaaatcataagcacaagctttttattcttgattattgtgtgcaaagtttgttctgccattacgtaacctaatctaaactaatctagctaacccatgcatatggtagttttgttgttctttttgcagtgtgcagagatcagtgcatgtgtcaatccatggatcggaagaatagtctattgagaccagtacaataaaattgcaatgattagattaattaattatagcaagtgtactccctgttctgcagtgtgcagactcaatgcatgtgtcaatgtggatcagaataatattatattgagcagtacatgaagaagtaacgtaaccctacaattaacaaaatgtactgacgcaacacctgtgcaggcaacatagtttggaataaagccataattttagataaaatatttcaagtgtatgtgctacatgaaaatagttgtgaggttgaagttgtgggcacattttataaacttatactagctaaaatttgtgaggttgaagtttggtctaaaatttgtgtatgaccgtctaatgtagccttttcctaaaagagaattcttgttggaaaaaaaaaaggttttatgcgtggtgtgtggttatttaattacaaaacaacctactatatgtacgaatatgttttttctatcagtatatatttttcccaacaacttagcctagctgccaaaaacatacaacaaatatgtgcgcaccactgtactatagttgacatatgaacagatagatgcatgctagatagtaattgacaacgtacttggaacacaatcacttgacattaccctttgtctttattgtggacaagctctgtgaggggatttcaatattatttgtgtgtactacgggtcatgcttcctaaataaagttaactagaataaattgcagtagtactgatagaattatattttgtgcacataaaaaaggtagagatactttattaatcgtgaggtggttgcaggaaaccaacaatttttcatcggtttcaaccgaccaaatcattgttgtgtttctgtcatgacaaagccttatgtcacctactgttgtacatagctagaggactaaatgtttttgttaatcctctacaaagtggctagtgttaataaccaatatatatagagagtgtgtttttttttcgaatataaagtgaattgtctgctttttctaatcagttgtggcttttagtttgaattgattggtgcacaacttaatatgcaatcagatccaaagatctcgagatcaaatcttggttagcgctctatttcatgctaaagggcttgaggaggcctcgcgtaagggtgcatgcaactcaatattctactatagtagtctccaatgacattttatgtgttttacccccccccccccccatcattatgcattccctactccccatgcattgtatgtgtgccggcttaatttgaatgtgtctatttttcacacgataattatttaaaaaccattgaaatgatatgatttaaaaacaacaagaaacaaacgatagattgcaccatatggtaaaataatgtgtttgggcttaatttgaagcgtgatcgatctgagttcgatcgacgaccccccaacgtaccaacaaccatatatatcgatatatatatgagccagaaaataatgctacaacaactaagtaaggacgaaaacggttttcctatatatatggaccgtggttacgtttggaccacgccaacaaagtaacaacaacgaccaacgaccattcattccgatgatctacttactcctatctatcagccgccacccaataatgaagctgcctgcatctgcatctgcatgccttgcccacggtaaaaaagaccaggctgctgctattgcagatttgcagcagcagcagcagatgcaacgacgacccaatgcaaattaagcctggatattttctgccaatacttacgctccctttcacccttgttgacccagctagctgccaattcaaagccattccaaacgcaaaaggatacagatgcgatgcgatgtgatgcgatgcgaaccgcggatggaaggcgtgcagatggatatggcacgcacggtgatgatgagagaaaaaaaaaacccctgctgctgcagccaacgtcgggaattgtgcacatcgatctctcgcgcgtgggggggcgtttgcagtgcaggcatgcatgcacagtggatataagctacagtagatattgtatagctatatactcaccctgctggcttctggctgatgctggagcttgctgttggagccacctccaccaccacctccaccattgctgctgctgccgccattgccaaggtacggcgagctcagagcctggagatccatgaccatgagatgggtcgtcggagattatatatattaactagagtgagaaatttcgttaattaggtttaatgtaagtgtgtagttatatggtagtagtattaggtggtactcccctcctccgttctaaaaaaaacttgacctcgtattacgatgtgacgcattctactaatacaacgaatctagacataaagattttagtactaggttgatttttttttaagacggagggagtatcgtactgaagctaattaagaggggcaaaaaaaagaaaaaaaagaaaagaaaaggtgtgtgatggcttgtggcagcacaggggaggacaacgtgtggctgcttttgcgaaaaggcaaagcaagcgagagcaagcactgtttacatgagatgagcagcaggcaggctaaaaagattgcatcctggctctctctctctctctctctctctctctctctctctctctctctctctgaccatctgcatgcatgcatatgctgctgcatcgatcagatcgacaagccagtataaacataaacacacatgcacggatcgaccgggattatataggtctagctatggcaacgcaggcacatatactacatatgcagctttagtatctgtaatatgcaagagagagcatgcattggtgcatagtagagccctgcctctttttgtttcaacctgtctagctccttctttggcacatcaaatcactgtataatattatttactctatcaatctactatgcatcatttcatggagctaagctaagctaagctaatctctgcatgcttgtaaccctagctatgaaatgtttcaattaagatgttattatgtcaaagtatgtatacttgcaattaatggagctgtctccagaaagtatgtatatatgttgtgtcaaaagtgaacaacgacctgccgcatgtacgaatgacaataaccaagaaacaaacactttatgattcatggattctgcttcctccgtttcacaatgtaagttattctagcattttctacattcataataatgttaatgaatctaaatagatatatatgtctagattcattaacatcagtataaatgtgggaaatggtagaatgacttacattgtgaaagagagggagtagcattatttgatagagctagctgctctgcaggtatgggcacgcatgcatggaggagagagagagatgatggagagaaatgagagggagagaaagagctggacctcaatttgaccgtgtaggaatctgatgtacccaatggcttcaaggagtacagacgcagtgtcagtctggcataaaagagaggttagcccatgtcaggatctcttttttgtatttttctctggaatattggatcttcttttactactacatgactggtcatcacccatcaggggttaaaaacaaagatacaaaagtactactatcaccacaagatactcctattctatagagagtttcattcattcccctatatatattgatatatataacttccttcttcggtaaagtagctaaagataactaattaggagtatatatgatcatcaacgcatcagataattctcagtagagttttccctcaaatttcattaacttctattttgtcttttccttttgtttcactgaaatatatatttgtaattttatgaacaaaataaatgagacttaattatatatgtaggaacagatcttactacttagaaataagaataatttacattaatctaaatttatatatacattgatgtattggactatagtaataattaagccggtgtgccatactcatgggcacatacgtactctttccgttttcatatccattaggtacaaggtctaatcattctccggaaaattacagctcatctcagaagaggctaaatgaggaactacttgacattgtatatatgtggtcatagcaccttataatattgtcttatccattgtctttccaactggtttttcttgtatatattccttacagaaataaccatctgttcgttgaacacttagcatttgtataattaagaaactttaccagatcaacgaactcagttgttatattctactagcctagtgacaattattctcttcccattgttgaaatctaaaagctaaagactaataacatgcatgtagtgatatatatgtaccttcccaaatggggagacaagctggtgaagggcagttattctatcacctagcttctccttcctcacctgaagaaaaagcacaagcaaaacatactaattaagaacgccatcatttccatctccaaccccatctcaccttatctcttaacctacaatgattccatgcctgtccgtttcagcaagcaaactattgcttcagtgctagcttagattgctctgattgattgggccatgctcattgagagatctagagagagagagagagagagagagagagagagagagagagagagagagagtaccttaactgtagcttgagccggagagggttcttgggtcctggccttcttgaaagctgctccagatgctgtgctgatgcactaggagaaacacaaaaggatggagagcaaagttacaaaactttcatacataactaattaattatcaacatggctccctatcttaactgcttccaggaggagtgaaactttcatgcatggttatctacccacacaaagctattagtattgaatctctctttctaaccatccaaaaggtgatgatgagcttcctcaaagaaagactttttcacccaccctcactcctcagtaaatgataagcacctaaaataatctacacacaaacaaaaattaccagactgattatcttgaatgatgattgtccctacctcacgtggtgaagtgttgtttgagaactccagcacgccgttgcttccaagggaggtggtagaggtgatgcaagaagacctaggggaggaagcttgctgctgcaaggcgttgtggtgggggtgatggccatggatgccaccccatggagaagacgacggccttgcagccactgccaattgggaagcatcatcactcgtgctgctcccatggctagtcgtggtggtgctgtagatgttgttgtagctgttgctcccatgatcagcttctgcagcagctgcagctggtgtagttgggaacagcacctggccttcccagttcttgttgtacccctcttcaccactagccaatccaccactggatgatcacaatatatatgaccatgtaaagagggagagatgaggtttttagcacaatattatttcatgtagctgttcagaagaattctagaaacagaccatttccaagaataatatcaagttaatcaattacaaacatataaataaaaaaagagagaatgtgtgtgtgtgaattacagtaagatatggttccatgagtcctggagatgttggccgtggcggctgccggtgtcgtgccaaggcgcggcggcggtgcttgtcgtcgcagtagaaggaagaggatagtgattcgagagcagcagggaggagaaggaatggaggggagaggaggaggaggagggagtagtggaggtggtggtggaggatggcaagaaaagagaagccggattgtgaagctgctcaacaaaggggggcctcaaattattcacactccaccatccatggccttcccccatctcccccactagagctgatgatttgtggaggactcccctatccatattccctctcccttgatatgctgatatgatcttccacccaagcaagctagctatactagcaaccaagcaacaaggtagcactcacttgatctctctttctctcactcactctctctctctagcttttgctcactctctccacaggctctctctctcagctagctagtgatctccttttacaccttgaggtcaacctttagagagagagagagagaggggggggagggagaaagcatatgagcctttggagggaagggaatctctcatgggcataagaacttattagtggaggagtggaagaagcttgaaagaagtcatgtgttttattttgcctccctccctctccatctccacctttactagttatcttttccttggctgccctttttttttctgctgctctccctggcatcccttttgtttttttgggcctacttttgcttttgtgaagaaatgggtcagtgaaaggtgtggaattgcatccaggctttaaagaatagccttaactaaaggaagatatggagggtttaagcttttggtttttgattggagagagtactataacaaaggctgcactaataagcaatatatatacatggatgggccaacaaggtctgattgatagaggaattcttgctcataagttagggcctgtttagatccatttggaatggtaaatggcaaatggcaaaagttttggcattgcaaaagtactagttggtatttagatgcatgttaaaattttgccattctagcactaaagtgagagggagtggtcccaaaacactttttgacacaatttgctactatggactagcaaatgccaaatgccaaattgccagcttttgctactagtgtttagatccaaaatggcaaaaagtgctacaaaatagcaaaacttttaccattttggaggatctaaacagggccttactgtatgagtactgcatctaacataaagtttgtgatttcctaaaactagacacaggccttggttggtcagtttttttacaccattttttggagcgggttttttatatgtgggattaggatggaaagaggagaacgaatgtgtttttaagatagtagagaaaaacataaaatttgatatcaatttcttttgacacacaaagttcggtcctcatcttgttcttatgatatatcttcttgtgaaattatgttagtgtatctaaaaagcctcatgtttagtccacggaccaacgattcaaaaaaaaaaagactagctagggagggacattcttaccttttaagttgtgctctaaaaaattagctattgatgtggactatacctaacacaccttaatatatgcctcagatttttctgctcataaaaataaatatattactcaagctttacaacacatctaataatgaagctttaagaattccagcatttttgtatggtttttaaaattaatctgggcagtatatatgtccatgcatgggaacaaaattgacctaaatcctagctagaatcacactcgatatacgtactactactatattctatatgtattactctgaatcggcagttcgatcggcacccgtttaacccatgtctaaattgtagtactctgaagttcacctcgtgattaaattactccgaagtttcttcgaggctaagtttaacctggctgacatgtccattcctagctaactagctagctctacagagttcagacggcctgaacttatcatcttttctcgtctttcatgcacaactgttctttatatggctttgtgctttcttcctagcattcctctcttttctgcagcttagggatgcataaactaaaggcctcaaacaccgagccaatttcttgcggattttagggatggaattaacacatatctttgttgttgatgatgatgatgaatgagatcgagacagtaccaaatctttgtctagcctgccttgtccttcatattacaaactcttctggataggtgtagcatagtagtatagtactaccagtactgtccttgccctagcatggaaagaatcatatgtgtaaagtgctactagtgtgcatgagtcatcaatcaaattaaagatggcatatgtataggtgtgtgtctcacatcagataaatgtaggagattattaaaagtctatgtaaaggttattaaggaaaaaaaacagctacggacaatgcatacatatttataggcttatagctactagctcctcatgtttgtgagttaatttgtcaaacctctcaatatatacttcctaactttcgttttctatgattatattgtgttcatgaacacatcgcaatgcagttattttgtcctgttagtctgtcagacatacaggaggatgcatttatagttttgtctctgatggggttttcggagatcaccaaattattttctgtcctatgtgatgttgcgttagggccggagagtgaccgcacaaagatatagtacccacctaaagtacaaaaataattgttcaaggagaaattagctgtagtccatgtgattcatgtgggctattcaccaaacaaataattatctaatttgaatattacagtatgtagactgtatataataatccggctgttaactaattaattatatagtacttagttaagcatgcccaggttctaaggcccctgcttaattttgggatagctatctcaaaattagagaaaaaatgttagttattccataagtttttttaggaaaaatactgcaaaatgtgaacttagaaactttcaatatacttacgtcgtcccaaaatataaacattttcaagctaggttggtacgggtattaagaaaatatgtaagaatgattagagaaagtgtgtgattggttaaaaagaaagtaggtgaaggagaatgattgtgattagttgagaggaggaggtaggtagagaaataattttattttgggacaagatattgtattagaaatagctacattttaagatggagataatattttccatgttaccatacggatatatgcagccttttaaattgagaacttactccctcaaataacctagtctaaaattcgttcctataaagatttgaattaagaaccttgggatgctactcaggtcactgcaacccctagatcatatgctggcccttctgcagttgacatgctacatggcttccgttatggacaaaactaaactagacataatttgtaaaaggtgtaggagtacatggatagctagcttatgaatagtgaatgcctaatttattatcgaattaagctagagattgtaccctactacttgcgttgttgtagcttaacagctagtaatgcatagctagctgcaagccttatcattttgttcccaagaatctactaatcactggtcgtcggcgcttatgatgacgaacactctaacaaagtcaaattttagctccaaaccttggtgcttattattagcgggaatggctgtaaccacgtcatgcaatcgtcaagcttaagtcatcagagattaatgggatcttctgcgccttgagctgcatgcacagtggcaaattggctcatcagatcacagtgatcaatcgaattggtgtctatatagctagctgaagtgctgaacgtacaatatatgtgtgcacactgtctgcatatattggtccacgtacgcatccaaatatgcagcaacacgcagaacattgcactgcaggtagatagctagggaccatatgcatgcatgaagccgttgtggaagaggagaaggggacatgtacatctgacaatattatgttccccaaagtcctatggtaatctatagaatgatactggttttcacaccggtcagtttatctctattatcaaaacgtcaacaaacgtgtgtatgtatccatatattttctgcatttaactgggaagaacattaagaaagtgtattcagttctatcaagattcatatacagatttacctaaaaaaattcatatctagcttcatctcactactaggaaaaatggtttttagcaacgttggccttttatttttccaggcgggtatgaccctcagagctaaatggccgcctagaaaaatgtaaatcggggtggagctcaccatccacctgcgaaaatcattttttccaggcggacctctgcaaaaatacctttattttcgcaggcggacctcttaagtggtccgcctggaaaaatatgatttttgcaggcggaaccttatgtggtccgcctataaaaatcatgcctccaaaaaaaaatcagtcatcgttatcctctcctccaccatccttatcttctcctctccaccactaatttccctcccctcctctctctctctccttctccctcacacacttagcaaaaaaaatatcccccattggctcacctcctccccacctccgccgccggctgccctcctccccgcctacgccgccggctgccctcctcgacgacgacgaccgcgacgccgcctccgctcgccgtcggctcccctcggccgcgagacgataaccttcgcggcaccgtgaagcggcggatccaccggctcccctcctctccgcctccgtcatcggctgccctcctccccgcctctgccgccagctccctcctcgatgaacgacgacgaccgcgacgccgcctctacgagccgtcggctcccctcggccgtgacgacaacaaccttcgcggcgccgtgaagcggcggatctaccggctcaactcctccccgcctccgccgctggtagccctcctcgattacgatgatgaccacgacgccgcctccgcgagccgtcggctcccctcggccgcgacgacgacgaccttcgcggcaccgtgaagcggcggatccaccggctcccctcctccctggctccgccgccggttcccctcctcgccgtcggctccgcctccatcgccggcttcctcctcctcgacgacgacgacggcggcgccaacgacgttgagatgacgacgacgacgacgacgacgatgatgcgacgacggcggcaacccctgtggggacggcagcggacggaggaggagagcaatcgtcggccggagggagaggccggcggaggcggtggggcgtcttttttttattcgctgaaatttgctttgcaggcaggtgaatctgccgcctgcgaagatgccgtccgcctgcaaaaattgattttcgtaggtgcctgcgaaaattatctattttcacagtcgtttgcttataggcggaacgccggtccacctaaaaagatggatttggcccgccttttttatagtagtgtcttcatgaatattaagcatgggcactactaattagtatttggtttcaatctaaactagcacatttgctattcaaattacctaaattatggtagggtatgttttgtactccaactcaaaacgggcctacatatttactactatatatgtcagtacttaggccttgtttagttggggaaaaaaattaggtttggtagtcaaatcggatatacggacacctatttgaagtattaaacgtaatctaataacaaaacaaattatagattccgccaggaaactgcgagacgaatttattaagtctaattaatctgtcattagcaaatgtttactgtagcaccacattgtcaaatcatggcacaattaggcttaaaagattcgtcttgcaatttagacgcaaactgtgtaattaattttttttttcacatttaatactccatacatgtatctaaacattccatgtgatgggtgaaaagtttttcttttggaagtaaacaaggccttactgtcatagtaagctgaattggagtacgggcacaatcaattggagttaatcattagtaagttgaccagaccaaaccagaccagataataatattaatagcaagctgctactgcctgtatttgcgcacactggcagatcgacagtggtactccttgcaactaggagcgttgcttgcaagacagaaatagggaaaatgaaggcaaaagtctggttcttctctctgagattcagactagtcctcctcagctggcctgtcccccgtgcatgcatatgttcgtcccaggtcatgagccgatgagcgagatcgattcatcgatcggaagttaattggatgacaacaaccgaagaaactaacgtacactatgatcgatcgaatgatattcacatatatatactacctctagtcgctgttttgaacaagcaaatggaatatatagtttgcctttttgccttagagttgtttgtcctgatgataaatgttaagacaaaacggagtatatatcagatatactgtatcttattcaccgggttatttgctatacacttcgagaaatagtttttttttaaaaaaaatcttctactgcattggtatgacaacacatgttttgttaagtttatttatcaaaatatttaatttattgctataattaaagataatccatggtaaaaactgaataattaaacaaacatgccttaataatttttcactgctcctaccactggtagagaaaccatctttgctcggtcgcctaaaatccacaatagtcccggttcgaataggaaccgggactaaagattatttttagtcccggttaaaaaaatttttgatctttagccccggactaaagatcatttttagtcccggttcaaaaagttatcggaccgagttagacctcaattcttttttagtcccggttggtataaacaaccgagactaaagatggatctttagtcccggttgtttataccaaccgggacaaaaaaaaatcaaccgagctagcgccactgccccgcccggccgcctcggtctctccccctttctttcccctcccctctcattaatcccttctccatccttatccatcccttctccatccttatcctcttccatcccttctctcccattcctctcccttctcttctcatcctgctcctcctcctcctcctaccacgtgaggccgggcggcgcacggtggtagggagggcgcggagcggtgggcggccgggcaggcggcggctcgggaggcaggcggccgggcaggcagcaggctgaggcgggcggccgagcaagcggccagcgaggcggcggcgctccctaggcgggcggcggagcccgaggcggcagcaggcgggcaccggccggcgaggcggcgggcggcgacgctccccaggcggcggtggagcccaaggcggccgggccgcaggccggcgaggcggcggacggccggcacccgatctctgcgatgtggttttttcctgatctgtgcgatgtgtgtagccgatctgtgcaatgtggatttctttttctgatctgtgtggccgatctgtgcgatgtgatttctttttctgatctgtgtgatgtgtgatgtgtgaatgaatttgtggggatgattttgtgattttgtgaatgatttgtgatgtatttggagatagaaaatgcagcttgatgtatttgtggattttgtgaatgatctgtggtgttcgaatgatttgtggataatatgaatgatttgtggagctcgaaatcatgcaagcagcagtaaaagaaaaagaaaaaaagaacattagtcccggttggtaactctaaccgggactagatccttagtcccggttagtaactccaaccgggactaaagatccatttttagtcccggttatttcaaccgggactaaaaatgggtatttttagtcccggattcgtagtctcggttgcataaccgggactatagggggttgtgaactgggactaaaaaaggtttgtccaccagtgtacaataatttaagctttcagttatttttctaagcaaaagcttgaggtttagctcgcagacgacaagaggagtgacaagaaagcacgtaactatacgtagattaagtacatacgtacttatgtactggtacatatcccgcaaaaaaaataaatgacaccattagaaaatggttaaatggatttgcctgctttgaaaaataccactacaatttgcttaattgaaacaatgtcattgtattcattaactcaaatatatattttacatatattttatgaaatatcctcatccgatccttaacattcttgtcttcctcggttgatcaacaagagcacactctctctctcttactctcgacgaggaggggctcttcctgtggtagagctcagtgtccctctcaccagtgtcaagcgttgctccagagctttggaagtgctcctcttacaggtggcggttttcgacaaatcgaacggcgatggcagttgggcatggcgaatccaactggtccaaataagtggaaggcgacaagaatctagcgatgatggaggagaggggggcttggatctagcggcgcttgatgctccaccccatctacctccctcctctggcgatgaaccggtgcacgagatcactcctggtggaagtggcgagcttgtcacgaaggtggaaaggtgtcaaagatggcgggtcatgtagcgtgctgtttgacgcggcagagggcaacgtggtggtggcaagctgcactgcggtggacagatctgatagaaacaatgagctcatcgcggcggcggcatcaacaactaggaggaggaggaggagtgagcagcgttggggatggcttcgtccctacagcggtacaggtgcaagcctcaaccctaccgccgtcgctcctctcttgctgcctttcttataggagcctatcgtccgatctcgccatgaaactgtgcacgagttgggtcgccgtggaaccagcatgagcagtggtgttagtgaagaaggcgtgatgaccttagctccacctgttgcatcgagggaagaagagatgaaggagggagaggaaggatgaataaagaagatatggtattttgatccatacgaaaatacattagataaaaagacgtacatcatggcacacattcgattttaagagtgttatagtggtactatttcaattaggtgaactgtaataacatcttttaaaacggttacgacagtatatatggatccaattaacccattagaaaatagttttagcaacccacattttctttcaacatgtataaagagatccgcttaattgtatatagtaagttggagggctctagttatataagacaaatcgattttcacatactatcattccacaaaatatgtataatattcagggtatgtacgatgaatcgaaggtcagtactcgtagcaatgagtagctgcgttgaccagaccgacctggacacacacacaggagtagcatgtggtgctgcgtggcagggccagcactgaaaatatgcaggtagagaccgactagaggagtgtggctgcgggcgggtcgctagatagtcggtgggaaaacgtcaaaaggcatgcggttaagaaatgaaagcggcacagaaagaaatcaaagagagagagctgctactggctccataccaaaaaagcctgcactgcatctctctctctctcgctcgctctgaaatctgatgaatcatcagagtaattcagagtcgcccgtcgagccgtgcgtgggccactggacaggccggagcgggccgggcccatcatgacgctcgcgagggcccccccgcgcggcagtgttggatggagatggatatgttagttgctggcccgcaagggccgccacgccatgcagcttaattaagtcctttgttctaaactaaatttgttttaagtaattattgcatcaaattttgtgaaagcagaagataaatggatagagaataaataaagagagacataattatattgggattttagaaaatgagggtagtctgattttgtattggtacgtgtgaaatatgtgaaaaatgaacttattttgggacggatagttactagcagaagccgagaataacacctatcttagcagtggatctacaagttttagggccaggtcattttattatcaaaatcaacattacaaatactaaaatttggcatatttttacgttgctaaatttctatagcgttgtatttgtttggtttggaacattactgaattttggtgaagtttttggaagagaaaactttcatagttactaaattttaatatggtagcaaactggtaatgataggatgtcgactgtgtttagtctgttatcctattaaaatttggtaaggttgaaagttgcaataaaataaatatgcgcttatagtagaaatttatcttgctactactatattaattgtttgatacaaaacttttatatggaactagcatattgttcgtgcttaaactcatttttctatcacttacatatctcacctcttaatctccacatatattttataagttggtaggtggattctttgatcctacacttttatttatttattctccttaaaagaaagaaatatggagttgaagggatggtgacagatccaccactcaccttattactagctactaacttttaacgtagggacatttaactatttatcacttttaaatttgacgctaatcatttgtcacttacgtgtcaatgcaatgtgaaatctcttatgtatatgatatatatgtccaaaatagcaaatgattaattctcacatctaggattaacatattcctttaaaatagtatacattcatatgatgcaaacacatttaaattcttactccctccagttccttattacttgatgctttagacaagaatatatataccaataagtaattaattagggtgactattaaatacatatgtgcggttagtttaatgtgttttgcatacataaagggggtaaattagttcaaattgaccacaccaaagataaaacatctttttttttcatccaatcagtttaagtgtcttgcgtcaactaataagaaaccggaaaccggagagagtatggagtgacacgataaaccaagagagtggtcgtctagagtcgcggggcgggggatccaccgttggtgaatgtaaggaggaggccgatgaggaggcggtggacgacgcgtacgccgagatcatcgagagtcacgcgcgcacgcggttggtgagcgtggaggatgatggcgggagaagaagaagatacgacgcatgcagactgtagttgccgcgcgcgcagggaggtcgatcggcgagaggatcgatcgatggcgccgcgcgtggtgcgtggcggggcccttaatttgccggcgcgcgatgcgatttcgagatccatccatccatctccccgcctcgttttcagcgctttattgcagcacgcacgcacgcacgcacgcgtccgggcccttttatagttttgtccagcgtcgattagccaggatcggaaatctgaataatcttgcattttgttgggctcttctcctcctagcttttagctcggccggtacggtacaacaaatcatatgcgtctccgttgatggacatggatggtcaacgagcgagcgaggtaggcgcgcccgacaccgcgtgcgcacgcccatcatggcgctatcggtcgatcgatgatgagcggtgaagaccggagatcgacgtacaagtgtacaacacagatagtaaggtcattggtcgatcggcgccaccacgtacgttttatttttttatttttccttttttctgagaattggcgccaagcattaccaacagtctacctatatgattcccaaaattgattttgagggattttagtccaaaaatcagctctaacagatccctactctcctacccgagttttggagttcccttctcctgcttcctcgctccgtttatatgcgggcgcgacactactacaacattgattatcctggacgtcctcctttttgtttccatgcggtccgttagtgaaaccgcacggaaaaataaagaaccgacgctggggtgtcgcccgcacggaaaaatcgattttcccgtgcaggcgtcctaacccaaccacacgggatattcctatctcctcctcccaaccacttcaaaattttcctatctctctcctcctttttccttttttcccgtgtgtcgaggggttaccctctctagcgggagatcgtgagaccccctttttgtgagttcggccgggggaagaggctcgcttggagagattgtgtagccgccctgaatcctgctaaagcactctcgggcaccggggttatacaagttcttgccgctgtcgagcataacaccctactcatgtgtatggaattatggatccgtattacaaaggctcctaaactcctgagagctcgcctgccttctcttcctagagtttaagtctactcagtgtcctctcctttcacggcaggcacggtcctccttttatagtccaaggggatatcacatgcatcgcctctacctacttttttatgagaatgggcccattctaccttgaccagaccgtggtctatgccttcgcccggaagctacgccgcgattggcccttcaatgggacccagcgccgcacctcatctgacacgggggacaactatgtcattcgcccttaaatgggcgaagactagtggccgtcctcctcatgtggagaggactccggatgacgctccgatgtaatgggacgtacctacctccactccaccggagacaggcgacgtgggggcgtgaccgcgcgtcaaccggacatgaccgacgacaggccggtcacacccgatttgacacgggccagtggcgcggtaccgcacgtccgcccttactgcattaaacgcggtgagggacggttggggcaccgcgcattgatggctgctcagcctagggttccccccctccctcacgctctgcccgccacgtggcagctggggagggccttgggtcgtggcaactcgagggcccgaggggcctgacatggcaccccgaggggcatgacgtggcaccccgaggccccctagccgtggccgcgactcacgaggtgcgggggtaggaccaggctgtagagccacgtgtgaggaagtgaagggaactctccctcgcttagcatacccccgggcccatatctccgacaccgtgcaacctcaaccactcccacctctaccttatctcttctccctcaaccactcccacctccacctctctctctaccttatctcttctcctcttctctccgacttcccacaggcctcctccccggccagcggcggctaggcgagggggccgggccaacgcctcgtctcttcctcctgtgcatggcgccgacacctcctctcctccaggcggctctcggcggcagggtcgacggcggctggcaggcgcagcagcagtgggctcaacggcggcgggcggacgtggggaggcggcggccgggagcagcgtgcgcacggccgacgatgacgacgacggcgaggcggcggccgggagcagcgtgcgcccggccgataacgacgacgaggcggcggccggaagtggcgtgtgcgcgatgacgacgatgactgcaaggcggcggccgggagtgggccgacgacgatgaacaggccaggtggcgagccggccgtgacagcgagcgggcgaggcggcggctgggcgagccaggcgctgggcgtggccgcgaccaggccaggcggcgagctgggcgcggcggcgggccagatgacgacgtcgacgacgcggcggcagcgagcgaccgattcacttttttttattttttttggttccgtgcggtcggtataacacaaccgcacgggataaatcgattatcccgtgcggttggaccgtccgcacgcgaaaatgccgattttcccagacgattggctccaggcgggccggacaaccgcacggaaaaatcaaaatgcccgtttggaaaaatcttgaatgtagtagtgcgaaaggcgctcccaatcacgcaatcccgcctctctccttcgttcccgcgcgtgggagatagcgatctttctgcgcgcgtgaaagaaaaaaaaaacgaaattttctattgatagtttaatagaagggcccacttttaagttttggggattgaatttaggctatctgttgaaggaaggagtttttcactttctattttcagtttaggaaacaaaaacaaatttttagacgaaaattatagataatttgttaatgatgttttaagtaggagtatgcatacccaacggagacagacagacagccagcaactttataccttcccactatacgcgcgcgcttggcatattatacaatctggaccagatatatacccaatagaatactactctataaggttaattggattcatgtcattatatattcaaaaggaatgttaattacgtcgtcgtacacacatttatagctctcagataaaaattaggagtggatttaacctcttgtaccaatgacataatatggcggggtcttgttacatgcatgtgagttatgagggtaaattttcaatttcagtctaatcgaaggatatatattcaagcttaactaggaaaaaaagagataaatggtcaaactttctccaagaaagttatccatctgattaacagtccggtcaattatcactcggccaacagcgcgcaagcgtgcgttccttcctaacaagagcgtaaaggaataagtccattttagatcacgtaatttattattgagtctaaaattcatccctgaaccacaatattaaatatggcgcgcccctcaaccacagtaaaaaaagaccaatgggtgacctcgccgaactctaggttcaccagtccgcttgtttgatcagtcacgcggatggtcgagctacggttcatgtatatacatctgcttcattattcctatccacaagccatggaatagtataatggttatcactggtggagaaaccatttttggtcccggttccattaaaaaccaggactaaaaacgatttttagtcccggtttataagcgtaacaggactagatgatctttattcccggttggggttaccaaccgggactaaagatctttagtcccggttgtctatatgtcaaaccatgtcaggcggctaggatctttagtcccggttggtaaaatcaaccgggagtaaagatctaactttattctcggttggtgttattaaccgggaataaaaatcaatacgaactatataatccctattacttatcctcttttcccgtccacacaacgaactctttctctatctcttttttcctctctaactccctatccttatcctttcttcttccttcttccttagttcttcttcttccttagcccgcttggatcggagcgagagaggctagccgcttggagcgagagcaggccgggtggcagccggcgcggcggcgcggagggacgggcggcggtggccggctggcgcggaggggaagccggcgcgcagcagcgcggagggccgcggcggcggcgcgggggccggccggtgatgaggggaggcggcgcggcggcgggcagcggcgcgacagccggcggcggcgcggcggcgcggcgtcgggtagtgccgcgggggccggccggcgcggaggggaggcggcgcggcggtggccggccggccggctcctctgttgtgtttttttttaagaatttgtgatttattgcaggatcatgtgatgaatttgatttgtgtgtgatgtgaacttgtgatatatttgtgatgaattttgtagaaacttgtgatgaatttgatttgtgtgtgatgtgaacttgtgatgtatttgtgatgaattttgtagaaacttgtgatgtaatttgatttgtgtgtaattttttttaggattttgtgatgtaattttttagaactttaaaatttgtgatgtaattttttagaactttaaaatttgtgatgtggatttgggatcttacttcgatttgggatatgcaaaccacccatatttagaagaaaatacacccagattcaggagaaaataaaaaaggaaaaaaaaacctggctatcctctttagtcccggtcggtaacaacaattgggactaaatctttagtcccagttatttcaaccgggaataaagatgcccatctttagttccggattgctactcccggttggaaacctgggactaaagggttccccaaccgagagtaaaaagggtttctctacctgtgtatggaacggtgttctcgatcaactagctggccaggaatcgattcccaccaaacgatagcagagctgatggttcggggcggtaggagcgagatagcggggctggtggatggtggtcaaaagctgcccggccacccccgtagttggccttctcatcgcctgctgcagtgttgcctgtatgaagaatggcattacaccaagtagcccacgcactgacttcagctcggcgctccccaccttgccatgacgtgtgccacctggatgcggatgaggtaaaggtgagagccgtatagcagcagcaaggttgcattggcgtggccgtaggggagcgtgtcgagccgcacagcgtccctccccgcatccgacatcgccatcgtcgagggcatcaccaccaagcgcctccgccagctactgctacggagggtcccatcataatattttttatttttaacaaatatatgcacgaacatgtgggtcccacattttttccttgatttaagtgtcacctgaacaccatgtaggcgctgaaaccgtattggaatcttatttacactggttttgaaagttgagggacacaactaattttagaatcgacgataaattgaaggacctcaagtgaactaactccgaggataaatccacatggaaaaagtacacccaaggtccctcaacttgttatcgggataaaaaacgtcctcaaaccgtaaaaccagataccgcgagtcccttaactatacaaaaccggtcacaataggtccctcggtggtttgatcccggtttactcctacgtatgctgagtcagcgtggaacccacgtgggtcccacatatcaggagtccacgtcatatctctttcctctcttctcttttccttcctcccctttttgctctctctctctcaggctgggccgacggtgagcggggctgagtggcgagaccatgacggcggccgcgcacaccactcccacctcaccgctgccgccatgaggcccgaggccccgagcgcgtcgtcccccaacaccaggctcgccgcctcatcgcccgcgacgacctcgccgaggccacgcgcctcgtcgaccgctcacgcggggaggcacccggcgccgccgtcgctgccttgaagacaaacgccaacgtgccccctgtgctgcgccgacgtgccggttccggcgaggccgacgagctcgacgatggcgaaggggaagcagcagcaaaccgcggacagcgccttcctcctcatacagcctcgccgccggcctctccgcctcttctctcttcgtgccctcgccgctggcctctcccgcgccgttgcagccgtcccctacccgccaccgccaccgccggagaggccacccccaccgccaacgccgacgacgaggcccgcaccctcctccctcgccccggagccgtcgacgacgacaaggcctagcggtacggagtcgtcggcgccgcctctccccatccgcagccgcgctcgcccgccgccgccaccgctctctctcaccgacgccacgccgctccgcctccggtgacctcatgtgcgtcgtcaagcgtttcgtcgacaccaacggcggcagtggcggcggggagaggagcggcacgcgggcgggcgcaggcggcgggggagcagcggggcgtggccggcgagcgaggaggtcgcgcctgggcagcgcgtgctgggcttggaagcactttctccaatccggtgaccgcggcagcgctagggtgattgactacgccctcctccttgacaaccacctcggcaagcgcctgaccgccgaccgcccgcgcgccgctgctccctcgtcgcctgcgcccgctcgtgtgccgctcctcccccgccgcctccgcttcgccggttgccgcgctctcgcctgcctgccgccaccgccactccactttgcttcaccgaccgccgcgctcgcacgccgcctccgtcggccgccgtggcggcgccgccctccgcctctcccgcttcgccccggccgccgcgttcgcacgctgcctccgtcctccggcttgtagagacagtgagagagagatgaggaagggagagaaaaggggaagggaggagaggaggctgacatgtggggcccacgtgggtcccacactgactcagctgccacgtgggataaaaccgggatcaaggtgaccggttttgtatagttaagggacctcgtatatctggttttgcggttcgaggacgttttttaatcacgctgacaagttgagggaccttcggtgtactttttccaatccacatttgcaacaatcacggtcacatgatgcgcgtgtgttacgagcatggcccatgtatgtgacaaagcccaagttcatcagtctcccactctctctgcacccagcccagtccgagcaatttcttttacgttgggccgagcccaccatctcctgctagctcagcccacttagctccgcccccaacccccctccacctcgtcgacgtgctcagttccggccgttcaccgccgcctccatctccctcctcgaagcgcctccgccgccgccgccgccgccgaggagaggtgtgtgtcggcgagcccctcacctgactccaaccgccgccttcgatggggcgcgtgaggcctctccaccacgcggcgaggaggctgctgctgctgttcccgcggccgagggccttctcctccgccgccgctgccgcgccctcgcgcgagccgctccacgtctgcgtcgtcggcagcgggcccgccgggttctacacggccgacaaggtacgggctgctacctctcttcctatagggtcctttctccaatttccccactgtaatgtagttgtcagatgacctgaaatccacttctagtttgcttctgaagatacttgcttgtgaaattattttagtctgagagcgtgtagatgtcaaatctcaaatgtggtggaacctagaaatattattttgctccaacatgcagatcaaaatgctgaattctgaaccatgttctgttaccaattaacgcacctgaacgcgtcattgcttatgtttcgctgaataaagaaaagtacattggcaggcaaattttgttgcaaatctgttccttttgcaagctattgtaccctttctgaacttctgtgggtgtttatcgagtgctcttatggtggattgagcagatgcttaagggccatgaaggagcacaggtcgatattattgataggctgccgacaccttttgggttagttcgatctggagtggctccagatcatccagaaacaaaggtgagcgttctccttattattttataaccaccaaactcaaatttgatctattattagtctataacaagtcgccaccagtaattttaggtgagcgaatcacgttttgcttagaggttgtgaatcattttctatttcttcagtggctgcatcatttttaagaagtttctagtcaattagaccaatattctgcacatgtggttctcttgttcttatcaacaaactagtgctgactaggctgctactaaatgccttctcaccagtgttatctgatcgtctgattaatcgtcctgatcggtcccctaactccgatcaaggacactcattcgatcagaaatctgatcgtctgattaatctttgataaagcacgactaattgtccgatcagagcacctatcgatcacttttagaacaagtgttagagtttagcacatgtgaatatgtgctactactgctactactgctggttgctttatactccctccgtcccaaattataaggcctatatttttttacatgatcttcaatgatatactttgaccaataatttattccatgttatgttcccaatgaatatgaaattagcatcacatgaaaataatacaaaatatgaatctagtgatataacatgcataatacttagcatagatatggttaatatgattattagtcaaaagctattgagtttgatttcctaaaaaagagagcgtcctataatttgggacggagggagtactttgattgctttatactagggcaagtaagtgaccatcttaccatcaattattagtactttgattgctgtatactatgcactataggttctggtatacatggtaccgatcaggtcgattaatcgaggttgatcgacgattaatcatcctggtcggtcccttggcgatcaggatcgatcagcgatcagataacattgcttctcacatcatggttttatccaccttctctatatgcatttttgtaacactaaatgcatttcttagaagattaagttcaccttaaactttccaacagattgtggtaaatcaattttctcgtgtagctgcaaatgaccgctgtcaattctatgggaatgtaacactaggaagggatgtatctctatcagagcttcggaagacatatgatgttgtaagttttagactatagccaagtggctacctttttgtggcaaactgatatatatcttttaccatcatttctgactgtgttacactgatgtatttactgctggacaggttgttcttgcttatggtgcagaaagtgataggtcacttggtattcctggggaggtatacctaacttggattcccttggtctctatgtcaaatattgtttatgggcaactgtagtattttgttatttgtgaacaattgttcggaatttgtttatgtatctttatgagatggttgtgtctaggtatcgcttaataaagagagtgcatataacgtttacaaccatactaacacaaagtgaaagagacaagataagttgtgtaatcaccaaataattgcatgcagggaataaaacactgaagaaacaaaattcatgtatttatgctgaaacaggatgtcacaagccattgaaataacaacttttttatttcggatattggcaagattgtgtagtgctatcaatttatcttatgattttcgttttgttttttcatcatgcgtgtgagttgtttattctcagtgtcatctttgttataggatctgaggggaatacattcggctcgagagtttgtgtggtggtataatggacatccagacatgtgcaacttggcacctgacttgcaaagcacagattctgctgttgttctaggccaggtgtgttgattttatgattgccaacaatctaacatgctgccaagataattgtttcatatattctatttctattcaaagtacagtctgtctatggtttcatttgaattgaagaactcttctggttcattaaaattggcagatttatttgtagatatatcctgtagaagtattcccagaattttaatggagaaaatcttcctttcatatatgatttctggctccttccatttgaggtttatgttgtctgcactctgcagtgcttacacttcagcattatatagctgtgttagacacataagttcaagtgttcattatcctgaagaaaatttgttttgtttctgctaacttactgcaaaagaaaatatccttttatgggaaatgtgtcatgtgcccagttaaatattcttttttttggcccatcctttaataccagttttcttctgtgcttctgatgatatgcagggaaatgttgctcttgatgttgcccgtattcttcttcgttgtacatctgagttggctgctacagatattgctgattatgctttggatgctctccgtggcagcacaataaagtgtgtccaatcttttgaatttgaaacaacatgttccattttttcaatcccttccatcagttcagttttaatggatgataatatttgtattgcattttttttgtatgtaaaggaaggtatacttggttgggagaaggggcccagtacaggcagcatgcacagctaaagaactacgtgaaattttaggtagtttgttttactgtttcattagctgtagcttaatgttgtctgtattagttttctgtcattttaaataatgaatgtttgatgcatatatgcaggtttgaaaaacgtccatgtcttcatcaaggaggctgatcttgtgaccttgcctgcagatgaggtttgtacaatgacatgaggtgtttcatgttgctactggacctgtaactgttcttttcgatatttattctggactagagacctcatttcctaatatttaaattcataacgaaataaaacttactcatccatgttggtagctactacagtaccttgctgtcaacatgatgccaatttggttttcggaatgttccatccaccttctctcttaggttatcttgcttgtgattgtgatagagcaaagcaatctgattgcaggaggagattaggaatagtagaattaaaagaagggtgtacgagctactatctaaagctgcaattgcgcataaaggaaagaataataatggccaaaaggagcttcactttgtgttttttaggagacctaccagatttctcccatcagaagatggtgtgacagttggtgccgtgcaacttgaaaagacttgtttaaaaggtcagatgtcagaaacgaaataccatatctttgcagactttttttaaacattattctgttggttatatagatgatggtgtggctggaaagcaggtcgcagttggaactggtgagtttgaagatctaaaatgtgggtaagtgctttggttcatactttcctgagtttttttgaccaggcagctctatggggtttcctagattcatttaatgtattttgtgtcttcttagactgatcttgaaaagtattgattacaatccttggggtgtgtagattcatctaataatctttcttcttcttagattggcctttaacagtatttgttacaaatcctaatacatatctttcttcttaggttggtcttgaaaagtattggatacaaatccttgccagtggaaggtttgccctttgacaaatacagaggtgcatgatattacctttgtgtttactcccatggagcttttttgtgtttgttttatcatttaatcctttaataaattttgtaaatacagttgtgccacaatcctttgtttattgcaggaattgtcccaaatttgaagggcagggttttgagtagtgaatctgagaatgccacagtggaaccagggctgtatgtggtgggatggttaaagagagggccaactggcatagttgccacaaatctccattgtgccgaagaaacagtatgtgcctttttgttttcttatgttctatcattgtgtttgaggaggtttatgggcaccctgatgcctgagtgtaactttatagttgcttaccttaaatcttatagtagtttttttggtttactcaacaaatgccttcaaatatatcttggagtagcttgatttattcgttttgaaagttccaacatggaagttcattaggtccatatacacctcaaatcctcaattattgtggatttgctcatccactactgtctttgcaatggaatagctactttgtagaggaaggctgttcttgtgaaataatcatgatgactctttttcaggagttatagttcttggttagctgataattttatttcactaacagactatctacatattgtacttactgttatatacaggtggcgagcatccttgaagatgacaagaaggggttgttcatgggaccttctgattcaaaaaagcaaggcaggaggggactccttgagattctagaacaaaagaacatccgctttgttccttttgatggctgggaaaagattgattctaaggaaaagatggcaggtgagctgaagaacaaacctagagagaagataacaacctggaatgaaatcctgatggcttcaaactagggatgaaagtgagggcagtcaattttgttctctagcatgtcttgtagaattacattaaagccaattctgctcttatagagataccaggaataaagtttcaactgactttggcatagtacacggaaaagctagaatggaaagctgtaacaagtgaagtattgcaacaatgtgcaaaagtggtacttcttatcatacaaatggtttctcactgtcctgtggtatccatttttgaaacctggagacaattcgttgccaactttggagaaaatattattcctgacaatatgcataacaattcatattatctgtgcttgttgatggctcggctggattcatattttcctggttgcttgactgcttatggcttgtgttttgaaattgcacttctccttccaattgagcgttcttaccttggagtatgcacaatttcaataactgtactctcttttgcttatgtggtcacagacgtcacaacatatggagacaaacatcacacgattgacatgtccaaaaaaaaaagtgtacatgttcaggcaaaaaataaataattttgttcgacgtagaaaaacaatcaaagaactacactgcatgtaaaatgatctctcagatagaagcaagcctaaaaagggagtgtccctgaagccagtagccgttgtaacttcaacttcagatgctttgtgtagcttacatgaacatatcctctctctttttttaatgcaaaatgcgccccttatgaagtaaatttcatcatatattctgtatggttccacaaaaatcatggaaatgctgcagtttgatctcattaaggggcttctctttttttttaatgcaaaatgcgccccttatgatgtaaatttcatcatatattctgtatagttccacaaaaatcatggaaatgctgcaatttgatctcatcaaggggcttcaggataggagcaggtaaacttctagttgtcattgcttgacaaacctgctgcattgttggccgggattttgggcagatttgcaggcaagcaaaagccaccagaacaagcaggatgatatccttctcttcggtggtcggcgccatgatgcgttggtccaggatatccttgagctttgtatgttgttctgttcggcaaaagaacggtagcagaagatctccaggatgttttcccatcaccacttccagcataaccacaccaaagctatacacatcgcacttctccgttaacaccattgtagatgacagttctgtggcaaaaaaaaaatgttctgctagttaagaaaaaaaacttttctatactagtatttctttttatgaattaagtgtccctttgaactgtaaaaattctacaagatttttgtaccgatcagttcagttccagccggaatctaaaaacttgccaagttacaaagatattttgcttgataaatcatgtcacattgtcatcttagctaaggattaaaaagtatatgtacctggggctatgtagccacatgtccctgcaaagatagtgctccagctagatgaattgtccttcaacttctttgccatgccgaagtcggataaataagccttaaaatcatggtctagcaagatgttgctacttttaatatcgcggtgcacgatcggatcatcacaatcatggtgcaagtaagagagagcttgagctatgtccatcacaatagtgactcttttacaccaatcaagttcctttgccaattcttggtcattccaaatggacgctaaacttcctctttcgatgagatcgtatacaagaaatttgcactgtgaatgagagcagtaaccgtgcaacttgacaatgcgacggtgcctgatttttgtcaacacttcaatctcagcaagaaatgctccaatgtcaaagtaatcttccattctgtgaagcagcttgatggcaaatacaccttttccttggatctcagctctaagacagatccataacttccaacaccgatgcagtatttttcatcaaaattttctgttgcgtaaagtgcatcttgaaacgcaacctttgcatcaaagttccatatggaaacgaagtctccagggatgatttctttgcccttttttgcaagttttcttctccaacaaaccactgtgatgcttccacccacgagccagatgcaagaaaacattgcaaaggcaagaagtagcctcggaacaagatgtttactgtcggaattttcatttgtatgtaaactgtcaggatttggatttgatggttgacatggtgtcaagccatataatggatcaccacagatacctgtattatggtctagtgaaactacagaagaggcttcagttgtgtagaaaccaaaaaatctgccgcccaaactgttgtatgataaattcagctcaagtaatcggtaaagcatcatgaaagtcattggtatggcaccacttaaattatttctgctcaaatccaactcagttaggtcggtacaatacccaagctcttctggtattggtcctgtcagtaagttgtttcgcaggcgcaacaaggacaaatggtgaaactgtcctatctgaggtggaatgcttcccgtaaactgattgctgcttagatctagaacaaaaagattacgtagaaatcctagttctggtggcagtatagcatttagcacattggactcaagtttcagtgttattaaagatataagtttcgaaaaggttgaagggatggggccaatgattcggttgttggaaagatccatgttttgtaagctcgttagatttcctatactttcaggaatggaacccgtgatttcatttgtggagagatacaattttattaaactccttaaatttcctatactttcaggaatgaaacccgtgatttcatttatggagagatacaattctattaaactcaaatttcctatactttcaggaataaaacccgtgatttcatttgtggagagatccaaggactttaaacttgttagattccctatggttgtaggtatggagccattgatattattatgatccagatctagcgcaactaaactatgaagcatccctatctcacgtggaatatgaccaaaaagattgttaaatccaagatctagaaaatacaatctagccaggtttcccaaactggaaggtattgggccagttaagctgttgtggcttaaatcaaggtactgcaagttatgtaatgtgtcaggcaagcaactgagtatcccttgtgacaaataattgttagaaagctcaaggaatcctaggttcgtaagattacctatcgatggcgggatggatccagtgagcttattgttagagagatccaagtacgagagctcagcaagacgaccaatatcagacggaattggtccatagagagagttaatgctaaggtcgagaaagacaagatgaggcaattgtgcaaatcggagcttgctcaaaccaccggagatgttacatgagaaaagtgtaatgtttgtcacaactaggatggcatcacgctcatggccacggcgcaccttgtagctgcagtatatgcctgaccagttgcatgggctggttgcgttgctccattcctctagcccgcagtaggagagatcgccccttagaccagatttccattggagaagtgcttcagcttggcgatccaacgcaggatttgcaattgcaaggcaggaaagacactgcagcgaaatcagcagaaccagcaatagctcctgtgaggcaactagtcgtctcatcttgtgttttgagtggcagtgtaggtgaagctctaaaacacacatagtacatattgatgggtcgacagaaagcgagagccactttaaccaaggagaccttgactctgactgacttcaggtaaatggatcaataatgcacgctcttgacaggactagtggagtcagtcaatgccccaaggaatgaggtccacctccatcactccatgtgcaagacaatgaaatccctggctcatacaagaacacatcgttggcacgtttagaaaggaaatccgcatgtagcagttccataagttcatgtttagttgggaggttatttctctgtatggatatctttaacaatattccaagacattggttagagggcaatcgcatgcttttcgcccaccctaataagctttaattttttcttttggctgctcctcttaaagtttttatagcatctcagcaatagaccttattttgaagcccctaaaagttaaatgtgggctgcccccatttcccaaggacaaaaaaaaaaaaacctccaactccaccagtagcccctatttcttagcctctattcatgtttctcttgtattttaaaatacaatctatgtttacactatgtttaacaccacaataattcaaacttaaatatttctgacacgtataatttaaccatacttaaattcacaatttcaaagtacacaattcaaattcaaaatcaaaattttcaaacatgtaaatatggtgtggtggcaataccatatactcatttttcaaacatgtaaaaatttttggagcaagagatgcaataaaattaaaatagactagtagcaaatgccaaaggcccatatactgtacactgctgctgcttcttttatgcatcagttcagtaaaaagaccttgttttccagtttttagaatattgagttattgatccaacctgtcactaattgatgcaattatcgatgagtaatgcacattagcaatagaaggttgatttctgcagattaatgattaaattacaagattcataaccatggaaataaaatgcaaaggggaaaaggggcagaaggaagtggagcagcgatgtgcaaagtatagatctagacgagcggcagcgtgggatgttgatcgccggagttgatgagtgcgaggttgacgacggcttacgcaaaaaaaaaggagaatggcagcgacggcgcatccaaggcgcgagagagacgagagaagtgcgcgcttgggattttccaccgcgccaacaaaaaagaggagagataggggctgggcctagagtccccaggattaagggctaggaggcgaaatttgggagctttcctattttggggccttttataggagccctggtggacctttatttttcttccttcacctcaaaaactctttgggggcttaatttaggtgctctgctgaagatgctcttcactctttgtggctttcatttgatttgtaatctgcaaacctttttctgttttggccatgtggtcaaacttttccatctctcaataccgtcgcagttttttttttaaaaaaaaactttaacaatataaaccagaagctcattgttttgatggagtttcttgatttttcttttatttccccaacaaaaaaagtacctgtactatattgagctttgcataataaaaatgcacaaggtgtgactgtacatgatatatcaatttaggctcattaatttattttagcttatatgcatggtttataagccactgtttctaaaccttaagttcaatgatgaagttcaacctattattcacataagttaaaaagaaaaagctatctccgatcatgggttattctccagaaacccaatttgcaggactttgtcacttcggattgtctacatttggagcaagtggtcaaggagttttttaccccggtatatgggtggcgacctagtcttcgggttgtagggccttgatcttgcacgctgtttttattctcttttattttgagtgtgttggagtttgttggctgtgtgcactgtcgtggtgcagaggccgggagtatccttggatgactaagatcaataaagcttctattatctaaaaaaaagaaaaagctacgcaaacaaaatctaacttttgcatgtcctgcagggcacataaattaaaccccaaataatttttgggtgaagaggaaaaaatcaagatccaacaaaaccagcactaaaccctcaaaataggaagacacctaaatcccacctctcagccctcaatcctagtgaatttgctaattagcgcgtacgcattggcagcacggacactgtcaacagtcacggcgctagtcctccccccttttttttttgggaaataggcactagtttctcttttttttcttggaaatcactcccttttttctccacacacacatgcaattttctttgcgatattttgtaaattgaatctttcaccttcaatatcagttgagagatttgaatttgagttgaaagtttttaaatttaagttgcatgttttaaatttggtatgaaagttttcaaatttaaatcgaatgttttgaattttgatgtgagagtttttaaatttgagttaaaagtttggtagcgctattccacgcgctacagcgcggaataataattcgagcgccgcacaccgccttctccttccggttttccccttttttaccaccccacctgtcctccgcatcccactttttctcggtttgtttttttcgttttttaccaccccaccttccgtgtttcttttttctctttaccgtcttatctgtgcttcatcaatgggcccggtaaaatattaactatccagatttttctgttattcattccttctctaaagtttttctgttttcgcgttttagtaaaatatttactgtctaatttttctttccaagttttccgtttttctaatatctccgcacgtttcaaaagtaacgaatttactcatggagtttttcatttactcccagcctcccacatctgcttattctaaagtaacaaatttattcgcatgaatgtctctacatcgtatgatgccatacgtaaatggtcgtaaaagaattactaccagcttacaactctagtacttcttttaccaatattatttagatttcgtggtctgcgagtaaaacaattaccatcttcctctcgatatagccatgatctcatagccactgtgtagtaatatgtttactgatgtattcaatatatagtattagtgtaaaaactgatactaagagtattgttgatctgtatcacaaaatagtcgtatgaatgaaaaaattataggctcaatcacacacaagcgataaaattactcacaggtgaatcaaactagaaaagaaaaaaaatgattcagccaaaaatccatcatggaaggatgtagcggtgtagtatagagatgagcttgacgttgcgcaatagcagccatccatcatctaacaagcacaaaaaaatgcaaaaacattctcgttcatgtcaatacagatgacgagcaaaagaaaaatagcaaacaatctccatcaccggtggactccaccctatcctctacggccagccacatggagcacgatgtgcaaatgtaggacttgtgcaacccatcaattgagatcaggtgatattggagattgcatgttaatttgatttgcaaaaaaaattagggcttcatgcgtgaagttgaaggagagtatgcagatgcaaatcagagtgccatttccttacttgcttgttctatcaatgtcgccgacatggagcagccgctggttgttgctattggctcaggtgaacacctccttgctggttatggtgctgcctagcgtctggcagcgaggctcgaagtagtgcctttgcctcaaccgccgccggccaccgctcgccggccaccgtcatcaaccgccacggtgtcgtcgtccttctccatggtgtgtcgccgatctgtgggctaggatagtggatcgattcagatccgaaaaaaaagtaaaaaatagagtggggacgagagtggttggttgggtacgggaaaaatagaatatataccggaagttgtttttatcatagtaaatcatttactccgataatggtgggtgcacgatgtgggacgtggggtgggatcggaagcaggggagttgtttttattatcgaagtaaatcgtttactcgaataaaggtggatgtttgaggcgcacgataggagtaaatcgtttactccgacaacggtaggagttggatgacgggacgtggggtggggtgagcctgggctgatgaatatttggcgcttggaatattaggagcgcgctgcactcctaatagtagttctattaaaagttttcaaatcttgacttagaatttttttaaaatttaagttaaaagtttcaaatcttgagttaagagttttaaatcttaaatttaaaagtttgttgcagttaaccctccgtacctatcctaattttccgcgtcctatccttaaaaaaaaaaaagaaataaaacgtgctaaaggttttttttttcttcgtgctaaaggttatttttttttcttagagaaaagcgaaaggaaaacagaaaaaatgaaaagcgactccgcgctgcggatcccgcgcgcgatttaatcacccgcgcacgcgcggggtaggagcccagtctccatctcattataatttaagcgccctcgctgcgccgccgtcggacgtcgggatccctgctccgccgtgcacgactccgtccgaggccacaggatccccaccatcgcactccccaatgacgagctacccgtgaacgacaacgccctcttcaggaatttcttggccttgctctccccggcggcagcaccatctataactttctataaacgtttttaaatcaccatgtggcactcctacaaacactcctagatcgccacatgtcatatctctaaaaagttctacaattttaaatacaaagaaaatatctaaccgtcaatttttacttaaatcggcgacccattattttagaccattaaattagatctaagaaggcaaatcccttcctcctaactcccgtacattacaaaaaaaaaaacactcccgtacgtttacatagaagtagggaaaaaaaatacgtactactatatttgccaaaaaaaaaaaggctgaacactattcatcgggaaaaaagccaaaaaagaaaaacgaacatatatgtacgctcacctcaagtaatgaaaaaacacagaaaaatagcataccatgcctcgcctgattttataaaaacattagattattacaactaaatttaagagatgtaaaacaactaaatatttaaaaattcccgactgttacgaaattatgatatgctactataaatttaccattagatttataacaaaaactgcaagaaaaactaattccatttatttatttcatcataaaaattataacaaaaataattatatcaattatatcatcatatataacttcataaacatggataacaaaaaatatatctatgattattcgaagtaaatatttcgttcattatgaaactgtgataagttacaataacattagagtcatgataacattatcagattgtcaaataaactactttcatgtattcatatttttaatttttattgtgaatatattgcaagaaagaccagatacaaagctcttactatggtactacctgcatatgttatacgtagataacttaaaggtatcaagcatatgtcccattaatcttgaatgtgtgtccaacccacttacaaattattatccaccaaacatcgagctacaattactaacaaggtatttgtgcatcatatcaaatatctaagataagatatgatgaacatgtgtaccattagacgcacaatagagataaagggcattttataagggacattcgctcatttaacccttttctaaagcttaacatcaatttaatcattttaaaaaaaagtttgcttatttgaccatgtttttcaaaatcgaagttgtcgtctgactctactttcactacatcctgagtttttcatttagagaaaaagaataacatgtatttacaagcccaaatgtctaaaataacactgagtacatcaaccttatcctcaaccactcatttgctcattccttatccccatctctcctctctctctctccaaagcgtgaagggcaggaggagcggtggcggtggcatagcgacagctgcggagggcccccggctgcttcgcggagggtaggagcggtggcagagaggcaacattaactcgccgacgaggaggaccgctggcggtggcggaaggggcagagacaactcggcagaggggaagcagcagctccatgaagggtaggaggggtggcgtcggctcagcgacgtggaggaccgccggcggtggcgaacgggaggcggtggctgtggaggagcggtagcaaccacggatatggtaggaggagcggaggcagagggatggtgtcggctcggtgatgagcagatattgaagttgtaaacagattcagtgatgaggaggataggcagtgacggtggaggggccgcggcacggtgacgaggaggaccaccggcgcccatgcgcatctccgccattagcttgctacctgcggtttcttccgcataaaattggaccaaaggagaaaaattaactttggaaaaatatggtcaaataagtaaggatagaagtggtatttggagcttttgttaacaccgatgaaccgatgaatgcccttaagagaagagggtcagagtgtagcttcggttttgaaaaggagggtcaaatgagcaaagtgaccaaaacagggtcaaatcggtagttggaccttcaaattgggtcaaatgtgcaattgctccattttataatatagattatatcattttgtatcattttatatacatacatagccaaagacacgtgtgatgtactttaatctatctaaaaaaaacatgtctacgataataagaatcatagaaatttaaaagacaaactcaagagcatataccctaataatacactaatagtaaataaaaatatcaatggctaatccctaggacatataaaattataaagtattattttatcggtttattaaactccctaaagaaccctcctacaacgtctattaaagtctttaacaaataagaggaaactttaaatttcttttgtaacagataaagcatctaaaacttaatcctcattaatttaattctcccattaattttggctattgggtcatttcaatgggtatgtgtatacacacattatttaataaaaaaattattcatccaagcatgttatctagcagaaaattatttgagatgtcaggtgaggttgtagtgacctgttgcatggtttagagggttgttgtaaggatgactagcgttgagttttactaggttgccagccatccaatgcatcacaaaaagagcccataggagattttttgtgttttgttgatcgagccaccattaagagaaggcaacaagggaaccccagtacaaatatttttttatgactaaatcttctcttaaatcaagtatctatgtaattttatttaagtcgcgttggcttgaagcatacataacttggtatatctagaaggctacatgttagaatattcaattaacccatcttagaaataataatacttagcaagaactcaagcagataacaaatttatatcattaattttgatatttaattttaatcgttggaaagggggagatagagtgaatggttcaaacagttattgaatattatccaaagcaagctaaatatttttttaaaagaatgagatatagcgggttactgattctgaagtattatcatactattcaagagtagagcaagtagtattcatatccaaaatacatacaaagaaccatcatacataattttaacattcagaaagatagagatgcctacgcaacgcacgagctaccttcctagttatataattaagtccattaaacttcctacaaacgctctcaatccaccacatgtcactcctacaaacactcctaaactgccacatggcactatataatctcaccgtcgattttcacttaaattggtagaccgatattttagaccattggattagatctattatttaagaaaataatcccttcctctgctgtgggccagaaaaagaaaaaaaaagaacatacgtatacgtgtgacttcgtacagccgtgggccggaaaaagaaaaaaacataagaacagtacgctctccctgtctcttcctcttccaattcttttatatctccatctctttctcttcctaattattttatgttatcaaattaaaaagagaaaactaaaattttagtattaagttgaccataattttaaatgtacacagctaatttatattctatctaaaacgttgctctatttataattaattgacaattttagatccaatgttttgctatatataagcaatatgttattgtggtatagacgatgcattttgcaagtttgtatgccatctaaataaattaaatacttattaacaacatatattatgttattatacatcattcttcaaacatgcatatatagtttcaccattggttacaagacaggtgcacataggttttgtgtttttcttacaccaaggtgcggggctcactatgtggaaaataaagaattaactcaaatatgaatagcacaaagcataacataaaaaaaaatccgattctttaggtagaccaaacaatccaattggttcgtgattttcctcagaaaatatgatcaaataataaaaacaagaagaatgaattagggaggcgttataaaaatcacatcccaaaagtaatgatgcatctttaattatatttagccatttgtgctctcgctttgctgcttcaatcgatcccaaatgggtcccaaatgggtgtttcccacactgtaagagaccatgaatttagcgtagccttacgtcccacgcccaatctattcattaataaacaacgataaaatatatcaatcttggctgcttacataaaagatgattgattttttttttaagttgacacctaaggtgtaacactgtcattatttatcatctcacgacatttgaacttaaaaataatacttgcataaaataaaaaaagaaatagaaaatgccaataaggagtaaagcaaaccaattagagaaattattataaagttttagaaaaatttggttctttcttttcaccaaaactggaacacctgttaccataaccattgtatcattgcgacactttttagtgcttagattctaatacccttcactcaatcacatatggtggtgttattagtttctctacatcatgcacatataaccttctaaggtagaaatatataattggtttaaaagttttattgaacttgatgttgactatgttttttttgaaaaaaaatctataggtctcacacattgtaacgaagcagggtctagataagtatctaaattatgtcaatatgaaccagtaagagggatggttaacttcatggaacaactaaaacataattattagcaataacagttttagaaaagatgttaaaaaagagtgagcctctaaacattccgtttgaataaacaagcactttacttttaatttacacttacctattttccaaatcaaactaagtctaccttcttttcttttggatgataaaccagctcatagataattgcttacgaatgaattgtatagtctaacggcaacgaatagcttagaaaaagttacccaagcaataccgattaagaaggtttttcaaacatatcataattttgaaatattgtattaataatctggttgatggtatacaagccttccaagccgaccctaagatacaagcccgtgcatttgtgcggactatctttctagttaatttaattgctgttgagatgttgctgttgcagcgaacacgtccaccgagcgagaggtggtacatattgatttggttcagattggtttgcagattagaccctcaaccaaacagagcaggcacatgattaattagtgcagattgatttgcactcaacacacatatacggattttattttttttagataatgacacaaatataacggatatacctagaacaaccaagaagatattagtttgcacgcttcaaattactgaaactttggtttcaagtttcatcaggatttttttctgaggtgtattatttgaacacttgattatttgaacaatacctagaacaaccaagatgtttttgcatctttttttttttgagcaaggggtttccccccatttccattaccagaaatgagattaccagagtacaggtccagaaaaaagaaaaaacgaccatccagattgttattacaaaagtagaggcaccgcgtcctccaaaaggattaagcatgtatcaacacacagaggaaagaacagaacactacatccagacgcgccatcagagtcttcgcagatcagttctcaagcctcctgttgttgatcctccatccaaatcttgattggtagacttcacttgtcacccgccttatgagcttggcacccaacagcaagtttcttcgatttgccttctgtttctccagaattgcccaggtttcaacccagtgacatgccaaaaaaatcaaatcagtagggtcatctgggagtttttttgtcaaaacaagctctatttcgagtcttccaaatagcccatatgacagctgcaaacccaattaccaccaaattcctggtagatttgtcaataacatttagccattgcccaaacaagtgttgagcatccaacattggttttatattaagagcacaaataacaacatgccaaatcagtttagccatgggacagtcaaaaaataaatgctgcactgtttcctccaaatcacaggactgacattttttatcacctttcctccatcctctcctatacaaattatctttagtgagaattttgtttttgacaaacaaccaaataaaaactttgattttcagtgggactttgaaattccaaactttcttaagagggaacactgcattgtttactttgagagctttgtaaaaagatttgacactaaatttaccatctttacagagattccaccaaactttgtccctacaatgttcatgaatcactacagtatcccaactttgttttattttgtcccaatccctgattttgttgccatgtaaggttctcctaaaccggatactatcaatacctctatgatgaacatctgcaattgtcactttgtttgtcatgaccacattataaagctcaggaaattggtcacaaaggggtctaccccccaaccagctatcttcccaaaaaagagtgtctcttccatcacccacctttttggtacaatatctataaaacagctctgtgatctccataatcccctgccaaaagtgtgaattgccaggttttttctcaattgcagacagaggttttccttttagatatttttctcttagcatgccttgccaccacccttcctcattttccagtctccatatccatttacccaatagagccttattcatgatatctaaatccaggacacccaaaccctaccctgatctctaggagagcaaacaagaggccattaaaccaggtggtattttttaataccttggtcttcttgccacaaaagtcttctcctgaaatagtccatcctatccctaacaccctgtggcagtctatagaaatagatcatgtacaaaggaacattggtcagacttgaattgatcagcactaatctccctccaatagactgaagtcttccttgccaacaccccagtttatgctccattttattttcagctttcttccagtctttatttaagattctctttttgtcaatagggatacctaagtaagtcatgggtaactccccaatcttgcaagtgaaaatctagctatatagaagctgattctccttagcctctccaaaacaaaacacctcacttttgtcaaagtttattttaagtccagaaatttttgcatctgacaggatgtttatgttcaggttgcaaaggttgcagtgtagtgcaaggtggtttgtcaggtcacaatgcccacctcagactacaaaactttttcaaggtttgtttgacacgctagtattttttttcctgatgcaagaagcgagtggtcagtgtgcaatgcctacatagcaggacatggtcttttttcaaagaaataccggatgccgttcgtgctgtcatggatcagaaacacggaaagaatggacgttgggcagctcagaaagaacgggtggaaaacaccctggcttttctggcctgacctatccatgttactgctgggaaagaatggatgagaggtatataggtataagagcatccccagcagcttctctatctggtcctccatccctaatttgacgcataggagcgaaaaaaccacctccagcaaatgcgccatccagtcatccaaaactagcgcatgcgccaaaaccggagagagaaagggtaaatatagcgtgtctctctcctcacgccatatcacaatggccgcgctcccgcccctatccggagttccgcgacctcccctccatcatcgtcgtcgctggcccctttttgattttttttttacacacgtcacctggcacttcatttgatcagctgccttgattcccaccaacactatgccattcactcgttcatccatccttgttagattggttgtgtgatgtttttcattattgcaatttgcaaactgatctttcccaaatttcccgttttagtacgaagattcgccaaggcttttgtgtattccctaataaaagaaaaggatgaaagaaaatctcagttgtaatattctaatgctctttttgttaaaaataatggatataatatcatcaacatctgaagagcaaatagagaaaagatcatacaaaatatacaatccaaatgatctcctaggcattggctccaccaattgaatataagttagggttaagattattcgccactcgttatgaaagtgttgaattaattatttgcgtgatagattaccattcgtacacaatggatagatgtgaatcctcagacaagagaaagagaagaaaataaaataattaaatggcagtggtgatcctcttacctcacctcgcaagtaatcttgatgatggtgatcgccgcaagtgatgaagcggtgtcgccgtcattgttcagcttcggccttcggctccagctccagccagcaaccaccatggacaacttgttgctgtagcaggggcatttctggcatcacagacaacatcccatatgctgcaaatggtatcaagctcgtacagaaataaaatgcatattacctcatcatgatagtactgattttatgtctaggtaggaatttagcattcaaaggatggcttcgtctcctagccctgacaacaatccctaacaccggtgaccgcgatccccgccattgccgccacccaaccagccctccacatccatcctaccaccccatacttccactgccccaaccccttcccatcgcccatcatctctactctcctttcaggttgtgaaaaccacctttcgccgcaaggcaagtgtctcctttttccagatccagatcttgattcacacccggaaagccatgtggccggccgcaccaggttgtgctagctcacctagccgtcggcctcctgacagcactgctggtgtgttggataagtctttgtggtccttggtcgtgatttttctttttgcttttgggtagtttcacctttttcaggacagcatctaccctttagcatatttttcagttgctaggacagctgcggttagtaggacagcagcagttagcatcttctttatgcctcctttatgctttattcagtttggatgccctctaggacagcaccccattcaaatttcgaattttagactaggagggtgcagcaataggctagcagccagctatggctatatatatatgtatccaacctctctcgggtaggtatggcttttgtgttttgtgaatgaagaaaaccagaaaattgccccatctcgagtgccatcctcttttcaatgagagtaaccattgaaattctaacatctggtatcagagccacactttcctgtaggctaaacatctcttgttccaccccttcccaagctcggttgagctctcagccagcagcagcagcagcaccggttgctcctccttcccctttccctttcccccctccacgcagcagccccccggaggtgcgccatgtccgacgctcggtctcggagttcggtcgcctcgagcactcggcgtcagcaggacgccgagctcgctgcagcagaagagcgcaggcgagcaacggctcagaccgctgtagcagtagcgagggcggccagactggcggcagcggagttggcagcagccagggcggaggcggaggcggcggaagatgcggcacgtgcggcggaggtagaggttgagaccttgcgtagcagcatcaacggctccatcgccggtgacatcaccgccgacagggagcttgaggagctggcaagaggaagggcacgggagcgggcagagcggtgggcagcagcccacctccacggcggcggcggcggcccaagggaccgcgcgcccgccgacgggaacccagacgggcgcgggcgtgccagcggcagcccggagcccgcacgcgcccctcgcaggcagcgcggctctctctcccttgacctgcgccatggtcaccacggcgtccagacggtggtcagggactttggtcccggcggtgggtggcctaccctcaccaaaaccaactacatcgagtgggccgcggtgatgagggtgaggctccaggtgcggcacatgtgggaggcagtccggtacggcgacgtcgactacgacgaggatcggcgggcactggatgccctcatcgctgcagtcccgcccgagatgcagttctcgctttcccagaagcggactgccaaggaggcctaggacgccatcgctgcggcacgcatcagcaacgaccgcgcccgcaagtccacactgcaggcactccgcaaggagtgggagaacctggccttcaagccaggtgaggatattgatgactttgctctccgtctcaagactctcttgcagaaaatggtgcagtacggcgacgacacctacgacgaggagagagctgtcgagaagctcttccgctgcgtccctgagaagtacaggcagatcgctcgctcgatcgaatctctgctggacctctccacgatgtcgatcgaggaggcgttaggtcgcctcaaggtcgtcgatggtgatgagccacagcctctctcggggcccatcaccatcggcgggaagctccatctcactcgggagcagtgggaggcctctcagggtgacgggaggaagggggagtcatcttcctcgacaggcggccgtaagccgcgcaaggtgcggggaggtgtccagctacggtgggcgcgaagacgtgccgagggtggcgcccgcagaggcgcccagggcgttgccaccggcaaccacaagccggcacgagacgacgcctgccgcaactgtggcaagcttggccattgggccaaagactgtcgacagccacgacgcggccaggcccacgtcgcacgggtggaggaggaagagccggctctgctcctggctcacgcaagcatcgaactacctccagcggcaccggccgcagcggctttcctccaccttgatgagccgaaggtactcgtctccctctgcaacggctccagcaacgacaaggctgatgggtggtacctcgacaccggcgccacccatcacatgaccggccgacgggagttcttcaccgagttcgactccagcgtccgaggctccgtcaagttcggggacgcctccggcgtggagatcaagggtgttggctccgtcaccttcaccgccaagtccggtgagcataggctgctcaccggagtctactacatccccacgttgaggaattctatcatcagcgtgggacagctggatgagaacggctcacgcgtgttggttgaggacggactcatgaggatttgggatcgccgtcgtcgccttcttgccaaggtaaccggaggcactaatcgactctacatcctcagcgcgcaggtcgcacaaccagtttgcctcgccgctcgtcgggacgacgaggcgtggcagtggcacgagcgcttcgggcacctccacttcgaggccctgaagcagctcagtgccaaggagatggtgcgaggcatgccgtgccttgaccatgtggagcagctctgcgacgtctgcgtggtgacgaagcagcggcggctcccctttccccagcagacgagcttccgagccaaggaacggctcgagctcatgcacggggacttgtgtggcccagtgacaccggccacaccaggaggacgatgttacttcctgctgctcgttgacgacctctcccgctacatgtgggtgatggtcctcggcagcaagggagaggctgcggacgccatcaggcatgcgcaggctgctgcagaggtggagtgcggccgcaagctgcgcgtgctgcgcaccgacaacggcggcgaattcacagcggctgaattcacgtcgtactgcgctgatgagggcattcagcgccactacaccatgccgtatagcccgcagcagaacggcgtcgtcgagcggcgcaaccagacggttgtggggatggctcgggccctcctcaagcagagggggatgccggccatcttctggggggagacggtggtgacggctgcctacatcctcaaccgctcgcctaccaaggccctcgatggtaggacaccgtacgaggtttggcatgggcgcaagccggcggtctcccacctacgggtcttcagctgcctcgcgttcgccaaggagcttggccacatcggcaagctcgacgacaggagcaccccaagggtgttcatcggctacgcgaagggctcgaaggccttccgcatcctcgacccggagacacagcgtgtgcgcactgcgcgcgatgttgtgttcgacgaagggcgagggtgggtatgggacaaggcggtggacgatggttcgactccgacgtacgacgacttcaccgtcgagtacgtctacttcgagggagctgggggagtaggtagctcttcttcaccgagcgtgtctaccccagcccccgaatctccaccgactccgacaccaacacaccctcgggccacgacttcgactacgacgagctcttcgttgacaccaccccagccagtgactccacatgctccagcaccaacagccactcctccaagcacgtctactccgacgccagctcgtgttgagcgcagcccggtggagttcgctactccgctctcccacgacggggagcgcatcgacgcgtaccacgacggcgagcagctacggtaccgtacgatggaggatcttctcggcgaccagccggtgccggtgcctcgcgacctagaggcgcagttgcaccttgcgtgcaacgacggtgagcctcggtcttttgcagaggccgagaaacacgcggcatggcgtgccgcgatgcagtcggagatggacgcggttcaggagaaccgcacctgggagcttgctgacctccctcgtggtcaccgcgcgatcacccttaagtgggtgttcaagctgaagagggatgaagccggagccatcgtcaagcacaaggctcgcttggtggcacgcggtttcgtgcagcaggaggggatcgactacgacgatgccttcgctcccgtggcacggatggagtccgtgtgactccttcttgcgctggctgatcaggaaggctggggcgtccatcacatggacgtcaagtcggcgtttctgaacgacaacttgaaggaggaggtctacgtgcaccagccgccgggatttgtgatccccggcaaggagggcaaggtgctacgcctgcacaaggccctctacggcttgcggcaggcaccgagggcgtggaatgccaagttggattccacgctcaaagggatgggcttcgagcaaagcccgcacgaggcggccatctactagcggggcaatggaggaaatgccttgctggtgggtgtctacgtcgacgacttggtgatcgccggcaccaaggatgcagaggtcgcggcgttcaaggaggagatgaaggccaccttccagatgagtgatctggggcctctctccttctacctggggatcgaagtgcaccaggacgactccgagatcacgcttcgacagaccgcctacgccaagcgcgtcgttgagctggctgggctcaccgattgcaacccagctctcactccgatggaggagagactgaagctgagccgcgacagcacagcggaggaggtggatgctacacagtaccggtgtcttgtggggagccttcgctacctcacccacacacggccggacttggccttctccgtcggctacgtcagtcggttcatgcagcgaccgacgatggagcaccagcaggctgtgaagaggatcatccgctacattgcggggactctcgaccacggtctctactacccgaggtgtcctggcaaggcacacttcgtcgggtacagcgacaacgaccacgccggcgacatcgacaccaacaagagcacgagcaggattctcttcttcctcggcaagtgcctcgttagctggcagtcggacaagcagcaagtggtggccctgtccagctacgaggccgagtacatagcggcctccgccgcttcgacccaggcgctctggcttgctcgactgcttagtgatctcctcggcagagacactggaacggtggagctcagggtggatagcaagtccgctctggccctggcaaagaaccccgtttttcacgaacggagcaagcacatccgggtgaggtaccacttcatccgaagctacttggaggaagggagcatcaaggcgagctacatcaataccaaggaccagcttgcggacttgctcaccaagcctcttgggaggatcaagttcctcgagctctgctccaggatcgggatggcccaacttgcccacaagacgacgcacaagacttagggggagaatgttggataagtctttgtggtccttggtcgtgattcttctttttgcttttgggtagtttcacctttttcaggacagcatctaccctttagcatatttttcagttgctaggacagctgcggttagtaggacagcagcagttagcatctcctttatgcctcctttatgctttattcagtttggatgccctctaggacagcaccccattcaaatttcgaattttagactaggagggtgcagcaataggctagcagccagcaatggctatatatatatatatatatatatatatatgtatgtatccaacctccctcgggtacgtatagcttttgtgttttgtgaatgaagaaaacaacgccaatgctgatatgtgactgaactaggataagctctttttattatttttaccaaaatgctaagctctaggcagtgtggaatataagcaaaatccagagaaacgccaatcaggcaaactgaatacgaaagcagaatcgcacaagaatcctgtcagggcttagtagcagcaaatagaggggaatagtacctctttttttttaaaaaaaaaatgattcaccattgggataactgaaccatggcaagattcagtactctgactctctgagttggcgaatccttcccgcccttcaagaatctgggtacttgtagtagaagatccccattcttcaggtagggcaacagtagcgacacaggtgttaggtgatggtgggccgccggcggtggcgccggcgcgacgacggagatggggaagaaggtggtatggccggccagcccagcctccctcattccttcgatcgaccctggagagattagagagagagagagagagagaaaaggattaggcttggctgtgcaggtgctgagagcctgagactaaaagattgaaaacgaaaatgaaaataggacgaggagaaattggaaaaaaaattctaaaaaaaaagagaggagaaattggcaaaagttcagagggactgctaactttgggtatcaaaataacaagaacgtttaccacggcggcaaattaacaagaacatcattaataatgcccaacaatctatcctcaaaattttgttttcaaggatttttaaggtatggacagattcttagggtacgtttggacctttggatagatcttgctcagctagactagctcacccaggccatagcccaccaaaatgttgacacataaatttggtatctaagatagaaaataggaaatattgactagatttgaaaataacccacactcactatatatattttgtctgaccggtggcatagctcctaatcatgcgctccccgcctctctcctcccattcccgcgtgtgggtgcgatctctttctgcgtggggggaaggaagaaaatggaaatttttgtttgtagtttaatagaaatgcccacttttagtttttagaaatagaatttaggctttcttttgaagggagaagtttttttcatttcctatttttagtttaggagacccaaaagtcaaattttgcggatagattattgctattatgttggtgatgctctgatactatctccgatctgagttcatagttcatacaggttaatacaatgatcaagctctcgtgcagtattggacatttggacctgttatagttactaaggcttcgttcgttcctaggcaatctggggaattgagagagaaaatcatctcgttttccgcgcgcacgtttcccaaactaccgaacagtgtgtttttttaaaaaaatttctatagaaaagttgctttaaaaaatcatattaatccatttttgaagtttaaaatagttaatactcaattaatcatgtgctaatggctcacctcgttttgcgtatcttcccaatctccccaatcccttctcctcaaacacaccctaagttacctgatattcttaggtaaataaaattcttgaaaggtggaggtaaatcaaattctgacattgtcctatatatctgaggtgaaatgctacctgtggtgctagattaattatgtaggataaattaaacctagctttgatgacagtgcacgtaaatcatctgatgggactcaagtcccaccgtacgatttgagggcaaaactatcccaaaataacagattttagggtagtaattgttgcatgaaacaccatattttgagcccaatcgaccaactcagaaaaccaaaatccgttacccttctctgcctgcaggctgcgcgccatcatctgacatacggccccaccagccagcctcacatatatgatatatttaccttttccctcttaccagccaagcaatggaattcagacgagacttggcaattgacataagagcaagtctaatagtatagcccactactagcttcaattcatgtatagccaatctaatagttaattcatacaatagttgcttactatattattaatatatggtcccacttatcatacacacagtgtgtcttggagtccgtgctgcagctggctacagatttatagcccgctgctcttctctcttatcgtttatctcattataatatgtttatagctggctaatagcctgctattgtacctgctctaaggcaggcggcgctgtgctcatgtagctagggaaccaaaactattgcttcaaattgttgtactctctccatttcatattacaagtcgtttgattttttttaattcaaacttctttaaatttaactaaatttgtagcaaaatatagtaatattcaatacaaaacaaacattgtatcaaaatatattcaataataaatttaataaaactaatttgatatcatagacattgctaaattttctgtaaacttaatcaatcctaaataatttttactgaggaaaaaagtcaaacgacttataatatgaaacggggggagtactttggtacaacataagtatataagattacacacgaatgcatggacacgattacatcagattttcaggaggtaaagagaaggaaaagagagatcaattacatctatagacttgagatcacaatcaaggtcatcactcttttttattggatttggaggcagccagagccagccattcctgcccattttacttgacagcctctttgacagtgatgtggcatcacgacgaagatgaagcatttggtttgacgagctcctccatcgccgctaccaccttcccttaccaaaattttgtagcggagtcgcagatctgctctttccttccattgttaaatctgaagaatgggcactgaatcaggtgcaaatcggcggcgatctctgcaatgcccagcccatctaacaagaggaggaaggaagagagacttgaagctgactggtggggtccgtatgtcagctaaaggccagggcggcaggatatcggatttcggttttctttttataatcaactgggctcaaaacatggtgttctgtgaaacaattataccctaaaaatgtgctgattacattttatgcaagatccaacgtcactaaactttgaatcatccttttttttctttatcacaggggttactaaaaccacatcctactatatatggaacttgggctacttggacgctagtccaatgagttaagtggtgtactctaaagaaaaaagtctaatatacccacgtaaaatagtttttttcctttttgggatttatgtattgtagtttagggtgataaatcccaaaaaggaaaaggaaaagctattttaggtggttaaattaattagattttttttctttagagtacaccacttgactcattggactagctcaaatcccagtattgctatatattggtcaatttccgtaaggttcaaggaatggaacctgtgatttggttgctggagagaaccaatgacactaaacttgttagatttcctaagttaggaatgaaaccggcgattctattatcggatagaaccaatgacactaagcttgttagatttcctaagttaggaatgaaaccggtgattctattattggatagatccaacgatactaaatcttgaagcatccctagctcattaggaatggaacccgtgatttcatttctaaatagatacaaggatatcaatctttgaagcatccctagctcatgaggaatatgaccagaaaacttattgaagctaaggtctagaaaatacaacgtggacaagtttcccaagctataaggtattgagccggttaatttgtttttgcttatatcgaggacctccaagatgtctagtgtgccaattcctgaatcagatagcccttgtgacaacaaattggaagagagatcaagagaggttagcactgtaagattacctaaggtgttgggatggatccagaaaacctattgctggacaaatccaaatcaaagaggtcgacaagacgacctatgcttgatgggataggcccagagatagagttgtttccgaggtcgagtccttgaagatgggggaattctgcaaaccagaacccgtccaaattgccggagatgccacacgagttaagcgaaatactgagaatacctggggcatcatcacttgtgctgcagacgatgccggtccagttgcatgtgttggtgcccttggtccatgagtttaggcagctaccatggccatctaatccagatttccattggagaagagcatctgcttgccggtccagcacacttgctgtagagtttgcaggacagagaaggcatgccgaggaaagcagcagcagctctagagcaaggagtttcatcttgtgtgtaagtgaagctcaaaacacacatggtaatgctgatggttggagagaaagtgagctacgcgtattatatccaaacgggcattgacttcaggtcaatgaatcatacattctaattactccctccataattataagaatttttaattaggagtaaacacaattattaagaaaataggtagaattaaatgtgaaaatgttcgtgattggatgagaaatgaaggtggattggaaaatttaatgctacagggttgtgattggttgaaaaaagaatttagatggacacattgttatattttgagacaaattctaaagactaaaaattattatattttagaacagagggagcaacattaatgaagcaagtggttaatcatgcattttcttacccgcataaacactcgtttaattgttcattttctttatggcagcacaaattaaatcttaaaaaaatatagaattgggaaaggcggaaaaaaaaacccacttccctgtcctatttgcatccttaattaagaggacagctataccttctatcaaagtcaatagatagtgtttggttgtttgctactctctccgttttatagtgtaagtcattcagcattgtccacatttatatagttgttaatgaatctatatatatacatatgtctaaattcattaatatctaaatgaatatggataaggctagaatgccttatattatgaaacggagggagtactatagatgatgacttgcaagtctcttaagtttcgaaagaaataatcacgcaattctgtgtttgactgtttgctactccctccatttcacaatgtaagtcattctagcattttccacatttatattgatgttaatgaatctagacatatatatctatctaaatttattaacattaatataaatatgggaaatgctacaatgacttatattgtgaaacggaggaagtactatagatgacgactagcaagtctcttaagtttcgaaagaaataatagcgcaattccgcgtttcaaaaaataggacacatgcatttgtacagtttttttccttaattcctaaggctatgtctttgtacagtttttcctcttacttaatgcaagtacaccttgccggatttaaaaaaaactccgcgtttcaacaacttgatatattgactcatgcaagcacacgtctttgatcatattgtacgactgcagtttataattaaaaattcaccatgaaactgacaactttaccccttttctagctttttcctggaataaaacagagaaccactttaaaatcattaggtacttatatcctatccataatctatcactggtggagaaaccctttgtagtcccggttcgtaaccccctttagtcccggtttccaaaccgggagtaccaatccgggactaaagatcgctatctttagtcccgggtgaaataaccgggagtaaagatcgatctttagtcccggttggtagatggctcagccacgtggccggctgagccatctttagtcccggttggtgttaccaaccgggactaaagatagagctgaccttttttttttgcatgcccctcttgctgcatggtttatatatatatatatatataaaccatgcatatatatgtttcaatacatatatatgcatacatatatatatgtatttatacatatatatgttatgcaaatgcatatgtatatagatatatatatgaacaaaatatatttacattatagaaaatgtgtacacatgcatatagaaacatatgtagtcatgtattaattacaatccattatatgtcctagctagctacgatttcgacgtagtagtactcgctgctagctcagaagctaaggaccggtgaattgtgtttccgtcgtagtagaattcacccttgggatcaaggatttcttcgttgatgaatcccatgagttgttcttgaaccgccgcgataaattccttgtgtgtggtcaggttatccctcatgcgaataaactatatgaatgtatgaaattgattagtaattaaacaagaaatcgctacgtaatgaaattttgaatttatttgtacgtacatcgagctctcttgtggtgatgatttggtctgcaaggcagtggcaatactcgcacatgtaatagccgcacaagttagttccctgcttttgctttgcgcactacaaataaatgacaaacaacgagagatctaattaatatacacttgtatgtatttgaatcggagaaatataaatgtagagcatgtgtactcacaggaaatttgaacttccgcctaagtctttctctccatttgccgcggaccaaatgacggaaccgataccaagccctacatggagtttaaagctatgattcgtagtagcaattaacataacaagattttcttaattaacaaaggaacttatgacggtacctgtctataagttcgaaaaccttgtcaaacgtagactcttttttatccattgagtcatatacgttgacggtgcaggcctccaggtcgatgagtaaaaacacccagtggaatctgcaatgtgcgtgggatgcattacatatgaaacacttagcaagttcgtacgggaatgaaatttggtatgtaggaagacagtaaaattaaactaactctgtgttgtatggcaacagtatgaacgtcttgtaatgctgcgccttcaggagatggatgagattgtcctctgtttcttgtggatattggtcgagcattgcgacgtttactttccgagggtcgatgaatccagtatcgaaaaccctccgccgtcgggccctttgaatctccattctacaacgataaaagggagtatattattttctatggtctacttatatacaaggacctaattaattaaaggagacgtatagtaagaaatctaactgaacgatatacttacaaaatccagcaactcataatagagacgtcgagggcgtccagctggtatagttcgtagattcccctgaaattgatccagagaatgtcatctccttgcaagaagtccgtgtccctgatcctcgctccgatcatctctctaccggtggcgctcatctccatgtacagctgatggaacttgtacatttgtgtgggtagggactgcagcagctcaggcttgacaagcggtttaccgagttcgtacatgtatttcacttccgccttttcgattggtgcgactcctagcaattgatccgtagttagaccggtgtcagtaataaattgttctatcgtcatttctttaccggtcaccaacggctcgatctcctggtttggttgctctccaagctgagggactggtttggactttccagaagatgctttcttcagcgttcgctcatagtccgatagcttgatggcctccttgacagatgcagacatacccctgaagaagttcctgacactggggtctataggaatcttcttttctggacttcgaggcttgaattgtctcttgacttctgatgcaacgtaagcgtcaagctcctcttgcgtgcaatcgtaccccgggtccttgttcttggcggcgtcaactttcgccttctttgttgcccttatgtgggcaagcggtggagctgggggggcccttgactttgaaggtgccggaagaggagcttgcgggggagtaggtgtaggagcacgaggaggagtcggtgcaggatcctgaggagtagatgctggagcctgaggtggagacggtgctggcggagcatgaggaggagacggtgcaggatcctgaggaggagatggcggagccggaggagatggtgcacgagacgccgcttgtcgcccagggaggatgatgtaccgcctgcgccatagaataatggcatggcatgtgtctcgtagatgcatctcaccgtctcctccagggtaatccagctcgaggtcctcgtacgcgccctcgaccaactcaacttcgaccttggagtatcctgctggaatcggcctgcagtggtaagtacctgaagggtccgttgggatggccatgcccgacgccaccttcatgttgtgagagattatttattagtaatcaacatatataagcagcaactagcggaatggctaaatcttacctttattgataagttcttcaaaggaatatgcagctcacatggtgtccgctgagtgatgtcatcaacgggacaggtcgattcgtcctgtgtttgcatggcgtccatgctctgtgatcctacctgccccgttgaggcgcagctgctacggtttcctgacgggctcaccattgcaggaggaatggtcggctggggatcatgggaccgatgtgcggccatgcgttcatcaaccttccttgccacctcctcttgcatgttgagttcgtagctcgatacccggaactctaggtctgcaatcttcgcctcggtatctctcttgctcctcatccgactcctgtacgtgtggatgtcctccttgaaaccaatcttccaaggaatcacccctttccctcgagttcgtcctggatgctctggagtctgcagggcgagtgtcagctcgtccctatctctgtctggtcggaacgtgccctgagaggaggcttccactgcatctgttagtcgtcgcgcagcctcttgtatctgatagccgaagaccagtgagccatcagctgggttgagcgttccaccgtgagcatagtaccagaacttcgatcgttccggccaattggctgttgccggttcgatacccctctcaatcaagctagcctccatctgctcccacttcggcatcgcgacgctatagcctcctgaccccaagtggtgatggtacttcttcttggcggcattttctttgtttctttccatcatcgccttcccttgttcacctgtcttatatgcaacgaactcgtcccagtgatcccttagctttgggaatgtgtcgaagttcggtgtctgccccttcagtatatacttctggtacagatctcccttgaagctctgaaactgttctgccattttcttcagagtccaccttttcactttgtcctctgtacccgcaggaagggtgaatgtctcgagcattgtggtccacagcatctctttctccgaatctgggacaaagctctcatgatctccgcgtgcccttattcttcgccagtacaccgtactgacaggcacattatcccgcacaacccaaccgctgtgacgtacatagttcttggcggcttcggccggggcactaggacgtccatcttcttccacttccgttatgatgtgccgaccctcaagcttcttcgctgcacctcgttgcccgcgtgccctcttctgtccaacggagggttgactaccactagcctcctcctcctggttcccctccacatccctttccacgtgcccctgctggttcccctccgcatccctctacacgttcccttcctcgttcaagtactggtttggatcctcgttcccctcttcttcattccagtactggttgcttccctccgcgattgtatcgtacaatatctgttcctcatcgcggtcagccatctgttgatacaagaaacatctgctaagtcacgagacatttatgttttaacaatctaagtcatgtatgctaagtgtaaatgtcgtacattagaaccctacacaaccttacgtgctaagtctaattacaaatcgtgatataagctaagtctaggtgatgtatattatacaaccctagctagtaaataattatatactaagtctaattacaaataaaataatcttatattaaaactcaaataatattacatgctaatactaaaatagtcatgtatatgctaagtgtttcgtgcgtatatgctaagtctaattaagactacaatagtcaattgctacttgtcgcaccaattccgtagtcaataattacataccaagtctaattacaaataaagtaatattatattaaaactcaaataatattacatgctaagactaaaatagtaatgtatgctaagtgtttcgtgcgtatatgctaagtctaattaagactacaatagtcaattcctaggagtcgcaccaattccgtagtcaataatgtcatactaagtctaatttgcaataaaataatcttatattaaaactcaaataatattagaacactacacaatcttatatgataagtctaattacagatctaataatcttaattaattgcattacaaatataacaatcatttatattattacgtcacttgcctgctccaattccttctagggctagctcttccactcaggcttgacggacgactccgacaacacgtcttttctgcaagataaaaaaaatgtattacgataaatgcgaagtaacatatatatatatatatacatgtatatatatatatatatatagtatatatatatatatatgtatatatatatatatatatatattgcatttcacgttaacgttcgtcctcgttcgttcgctcgttcacgttccctagctcgttcacgtttgttcgatcgttctcgttctcgttcacgttgtcgcggcaacgtacgttgacgtgttcgttctcgctctcgttcgttcgatcgttctcgttctcgttcgttaacggcggtgtggcggcatcggggcggcggttgccgcggcggcgtggcgacggcggcggcggcgtggcgttgtggggccgtggcggcggcggcgtggcgtggcggcggtggcgtggcgtggcgtggcggcggcggcgtggcgtggcggcggcggcattgcgcgcgcggcggcgaaggcggcggcggcgtggcgacggcggcggcggcgtggcgttggcatgcggcggcggcgttgcgcggcgtcgaaggcggcggcgtcgaaggcgacggagagagatcgagatcggagagatcgagatgcatgaagggagatgcggcggctctcaccccagagatgcgacggcagcggaggaggcggaggcggcggcgaggatgacgagctcgagaggacggcgagatacggcggcgtcggcgcggggatttgccctaggcagtggcggcgaaggagagaggccgagagagatcgatcggccgaaaacgtttaagtgttggtgaagaagacgagggcgcatcgggaatatatatacccctggatctttactcccggttgttctcaacaaccgggactaaagatatctttagtcccggttgttgagaacaaccgggagtaaagaaaaaatctttactcccggttgttgagaacaaccgggactaaagatatctgatatctttagtcccggttgttctcaacaaccgggagtaaatatcttttcccgctatttcgaaattctttttaaacccggttagggttaagaaccgggactaaagattatagcactgcatatgattttcgcttacatatgtgtttataaaatagaagttaatgcattaacattatttaaagtacaaagattgatgacaattacttcgaaaaattatttttgtctgtaataaattaagtggataaatcgtaataagcaaatatatgacttataattaataaaaattccaatatatatatatattcttagcatatatatgaatgatattattatattggtaaaaactctaattaagatattaatgtacatactgcatgatttaaaattaataaaaattgtaatcatcatatgtacttagcgtaggaattatattaaattaaatgctaaaaactctaattaacatatgtaaatgccacatgcatgatttaaaccttttaaaaattcgaatagtcatatataagtagcatatgaaagatagtaaattaaattgtgaaaaactctaatatatgaatgatagttttaaaaatatattaaatttaatacttttaaaaattctccagtcaattataattagcatatgaatgatagtaaattaaatgttaaaaactctaattaacatatgaaattgccacttgcgtgatttaaaacttttaaaaatcctctagtcaattataattagcatatgaatgctagtaaattaaatgttaaaaactctaattaacatacatatgaaattgccacctgtgtgatttaaaacttttaaaaattgtaagtatcacatataactaacatatacatgatttaaacttgttgaaacctctaataatcgtgcgtaattaacatatgccatacatcaattgatttatatggataatcaatacatccaaaatagtttacatcgtgtacacaataattacggcattacatcggcggtgacggttgaccgcacgtactttctcctcactattgttccctccttgtgatcgctgcgtgagtaaggggtgtcttcatttgataggaggatgctagggtcaatcgtcaccgtgaaagggggttgcccatccaactgatcgtaatcctcgtcagtcttgtcctcaactccgacgatttttcttttgcctgggagaaccacttgacgcttaggctcatcaggccctctgcccttctttcctttgctagacatgtccttcacgaaaaagacttgcgttacatcattggcaaggacaaaaggttcgtccgagtatccaaccttgttaaggtcaacagttgtcatcccactgtcatcaatcattacgcctccaccagtcaacctaacccattggcaccggaacagaggaaccttgagaggaccatagtcaagttcccatatgtcctcgatggcaccgtaatacgtggcagttgttccatcgtgtcccatggcatcgacacgaacagcgctgttttggttcgtgctcttcatgtcttggactctcgtgtagaatgtgtacccattgatctcatatccctggaatgtcgcgatcgacctagacggtcccctcgctaggaaggcaagttgttggttgatcgactcgttacccatgagatgttgtcgtagccacgcgggaaaagtatcaatgtgatgccgtgtaatccatgcatcggacttaccgatgttcctggcgcgaactagagccaagtgctcctcgatgtaaggagctaccaatgaagagtgttgcagaacagtgaaatgggctttacagaataaattgttgtctaccgtcattattgctttccttctgagagttccctttccccgtagtctcccttcatggcgtgattcaggtaccccgattgggcgaaggtcttcgataaattctacgcaaaattcgatgacctcctctgttccataacccttggcgatgcttgcctctggacgagcacggttacgaacatacttcttcagaacgcccatgtacctctcgaaaggaaacatgttgtgtaggtacataggcccgagaatacggatctctttcacaaggtgacaaagcagatgcgtcattatattgaaaaatgaaggtggaaatatcaactcaaaactgacgagacattgcaccacttcattctgaagggcttctaatctatccggatcgatgaccttctgcgaaattgcgttcatgaatgcacatagctttgttattgttgcccggacattgtctggaaggataccccttattacaactggtagcagttgtgtcatcaacacgtgacagtcatgagactttaggtttgtgaacttcttctccttcgtgcttattattcgcttgatattcgtggagtatccagacggtacctttatgctctccaagcattcaaacatactttccttctctgccttgctatgagtgtagctggctggactcaagtaatggcttcctttctcctttggttccgggtgaaggtcgccgcgttgttccatatgcttcagatcattacgtgcttccagtgtatctttcgactttccgtatacacctaggaagtcaagaaggtttacgcaaaggttcttagtgaggtgcatcacgtcgattgcgtggcgtacgtccaagaattcccaatatggtaactcccaaaatatagagttctttttccacatcgccgcgtgaccatcttcgctctctatatgctggcttccaggcccctttccgaacactactttaagatctttaaccatagcaaacactgttttcccgctgcgatgtttaggcttcgtacggtggtcgaccttatgttcgaagtgcttgcctttcttccgtaccgggtggtttgctgcaaggaatcgacgatgacccatgtatacaaccttcctacagtgcttaagatacgtactttctgtttcatccatacagtgagtgcaagccttgtaccccttgttggactgtccggataggttgctaagtgcaggccaatcgttgatggttacgaacagcagcgctcgtaggttaaactcctcctgtttgtcctcgtcccacacggggacacctttcttcttccacaattgtttaagatcttcgaccagtggtcttaggtacacgtcgatgtcgttaccaggttgcttggggccttgaataataatcggcatcattatgtacatcctcttcatgcatagccagggggggaggttgtagatacacatcgtaacgggccaagtgctatggccgctgctcatctctccaaaaggattcatgccatccgtactcaaaccaaaccgtatgtttcgtgcgtcctttccaaattctttaaattttctgtcgatgtttcgccactgcgaaccatcggcggggtgtctcagcatcccgtcctgttgacgctcttcagcgtgccatcgcaacattctagcattccccttgttcctgaacaaacgccttagccgtggtattatagggaaataccacatcaccttagcaggaattctcttctttgttagctgcccgtcaacttctccaggatcgtcccgtctaatcttgtatcgtagtgctttgcaaacagggcatgcttctaggttctcatactcctcaccgcgatataggatacaatcgttcggacatgcgtgaatcttatgaacttccagtcctaacgggcagactatcttcttagcctcgtacgttgtctcgggcaatttgtttccccccggaagaatgttcttgacgagtttcaataaatcgccaaatgccttgtcactaaccccattttttgccttccattgcaacaactccagagtggtatccaactttttgtgcccctgctcgcaacctgggtacaacgaagttctgtggtcctccaacatcttgtccaatttatgggcctccttttcactttcgcagtcttccctggcgtcctgcaacatctgaccaagatcatccgcaacgtcgttaccatcagcagctatttcctcctcgtccgtttgatttccttcaaatccaacatactgagcaaagtccggaatattgtcgtcttccacttcatcttcttccatttcaacaccttgctctccgtgggatgtccaacaattatagcttggcatgaaccccgactcaaacaagtggaaatgaatagtcctggatgcagaatactccttctgattcttacacttattgcatggacaacaaataaaacctctttgcctgttagcttcggccactctcaaaaaatagtgcacgccgtcaataaactctttggaccgccggtcagcgtacatccattgccgatccatctacatgagtcaaaaaaaccgcacacaaataattattcttacaataatgacagtcatacaataattataagatatctttattcatacaaaaatcataaaatattacaccaaataattcttaaaaactatttgtaaagttttaaactaattttaatgtgttttacttcttttaatttttattttagtttgttttctattatttaatattaactttcactagagttttccttctcaactattttataaaaccttgtttagcaaatgaactaaatttctatatattctttcttccccacacacattttctctctcatcaacttacaactaaattttggagacaaaaaaagtgtgcaaaacataggtgcaaatgtagtatgacaaaaaaaacattggaggatgaagttgcaaaccttttaggcacctccaatttgtatgtaatcaccaaaataaattcaatagaaattttggcatgacctcccctcttttttgaagaaattttgaagcttgctcgggcagctggaggaggaagaagacatatatataggggtgggactttagtcccggttggtagcaccaaccggggctaaagatcaccgggatcattagtcccggttggtgctaccaaccgggactaaagatcccgggggggcctgacaggtcctgacagcattcgaaccgggactaaagatgatctttagtcccggttggtaacacaaaccgggactaaagatcaaatatgcccgttacccttttgaaccgggactaaagatcatctttagccccggtttttattgcatccgggactattgtggaaatcggccgaccgacgaaagatggtttctccaccagtgtatctatctatctatctatcttctatctattttatatactaaaagtccataaaacttcctagaaacgctctcaaatcgccacgtggcattctacaaacgctcttacgccgccacgtggcactataataaattagaaaaaatcatagaaattctaaaaaaacaaaacatctaacccttgattttcacttaaagcggtggacccgttattttagaccgttagattattagatctgtaaataaaatagtctctcactcctaatatcgcgttcacgtatgagagaaaatctttacgtacggttcatccaaacaaaaaagccaaagatatgcatacatatacaatctaaataaagaacaaaaaacacaaaaaattacatatatatgattggaaaaaaacacacagccaagattaattataaaaccacaaacctgaacgaccagccaagattaattcctctctcttttctctgtaagttgtcgagatctaaaacataataaaatctaaacaacatttgatttgtatcttcagttgaatatgtatggttatacgtcagagtgtcgtcctcatggagggctacatgcatgcgtggatccgcatgtgttaatttttgaaaaatatatgttgattttatgatcaatttaattctttatattcttgacaattaaataaataatttaaatccatattgattgttttatctatctatctatcttctattataaactgaaagtccataaaacttcctaccaatgctactaagccgctatgtgggagttctacaaaccctcctaattcctaaaccaccacatgacactttaataaacaactgaacccactatttttaactactattagaatttttattccacttccctctcctatcccccatcggcctatatccaggcacgtacatacgttcgtaacaaaaaatacgtacccactgtttgccaaagaaaaacaaaaaaaatcacctacgaagcgatcaatccttaccgccttattttcttcagttattcactatttaaaactttataaaacataggatgtatcttatctataaaaaatataacatcgatattacctatattttaactaaaaaaattgccacatggaaccatagtcttgataattacttcatttgtgtttccataaccgacaactaaaataagctcctaagtcgctaagtaatactccaataaattagagaaaatcatagaaattacgaagaaaaaacaaaaaaccattgatttttacttaaatatggactaattattttatgccgttagatttatttttgcaatataaaaatggaaaaggcccactttccaccccttcacatcatgtatgtatgaacgtgaggtacatacgtacgtatctctcctctcctctcacccctctcttattttttaactaccgacatcatataaatataaaatcaatagttagatagcttgatgatcataattgatagttcgttaaacttcctatgaacactcctaagaaaatagagaaattcgactatcgatttttatttaaatcagtgagatctttagatctataaaaaaaaatctccccccatcgacgcctttatgaggcgttctcacgcatgtgcctaacctactctctctccgttcctttctgttttttttttatttctatgataactaaaattattatttttcttatgggcctacaaaatccaatgatagacatcaatctctactagatctatcaagctcttcctctattctctctttataatatgttaaacatcacacaaacatttttaaataactacaaaacactcttaagttagagaaaatccaaaaaaaaaaaattaaaacatctgaacctatatctgtgcccctatgtgacatcatgacaaagaatgattagttgtaccaacgtatgataaattattttgttaattacaagaaaaaaattaaatgtgataactttatatctacagtgcaaatatgttctacgaacacatatgtacattgttcattattattgtaaatttcacaaagggggaggtgatatagtcgcacaaatgcgcgactttatataaaagtcgattaaacttcctacaaacgttttaaccattacgtggtatcctacatacgctcctgaaccatcacatgacgctctaataaattaaaaaatcatataaattatgataaaaagcaaaacatcttatccttgattttcacttaaattgatgacccgttattttaggctattggatttatctcatcgaaagagaacaaccagggcctccaccgttattagattgatctaattaaccagagcctcaagcggtcaagcccacgtcacctccccatgcatgcgatgcatggtggaaagaaattctacagtacctcagacagttgcaggagatcgttgtcaccgtgtcaagtttctctgatgagctacactttatattgtatacaagacaacttcaactttatgaagatggatctaatttgcacggttttaagtaattttagtttagaatttatacgccagcgatggttactagcatgcagagaaacaccacacgaattcatcataaacattcctaatcaaatttctaacacaattaaataagatgcccacacatatgcgcaggctaccttcctaggtcgtttctttaaaataccgtatggtctcacatattttatagaagcgctatataagatatgtatatttgatcaattaaaaagagggctagcaggatggcaaaagaataaatttacgagcaataaaagtttctcaagacttcttaagaaaaaaaagtaaacaatgaaaattcaattaaaaaataaaataccttactttaatttcaaattattttgttagaactatttccaaaacaaaataatatgcatgtccgtgcatttgcgcgggctacctttctatttgttttagaaaatgaattgatctcgcatgtgttcatccagtaagaacaaaaggggtacggtatatctttgcgctagatttccattggagaagcacatttccattgattgagagaagagatcttgacgctgacttcagttcaatgaatcattcacgcttgctacaggattattgtagtcagtcaatacatgcccaaagaatatataggctagctaatgcacctttatcacttgtgcaagaccatgaaatcctggcttagatgaagaggccttttacccatagttggctgctttagaagaaatactacctccctttattgtccataatgtaagggactttatcccttttcaagaaattaattaagcttaaaaagaaaaaactagaacacccttatcaaataagatatggttgtgaccttgtgggtggcaggatagttagagataagatggaatgaaatttgaattatatataattaattgatgtgtcaaccaatacaccgaaatccttgtatttggggacaaagtagaagagataaaagccctattatgggacatgtatcaagtacgacgtaccgattaacagtgaggtgcttgtggtgacttcgtcaatctcaaaatttatcggtccagtctctcagacatacttataaaggtagggtgtgcgttcatagggttaagtgtgcgtgtgatgtgagcgtctgcgtttgtactttgttaaacaaaaatccaacattatttgttgtttctcttttagtttaatagataaaaaatagggaggtgatgaacagtgttgtgtgcatgtgatggcaacaaggaggtggaggagattttattttttctaatatttctaaatgatttaagtgaaagccgatgttggggtgtttcatttttctaagaaacgttctttctgtttttttgtcacgtggcaatttaagaatttttttttcgacacaaaagaggcatactgtaaggaaagtagcaacgccaccaccaacagctccgaggcaaagtatttcatcttgtgcaggtgaagttccaaaccaaactcatgtaccgatgtacgcatatgtggatgggtttcttgtgttgttgtttggcctgtgacaagtcttgttttgtttctacccctctctctctccctctctctctctctgtgatttggctgaactctttgtttactccttcactatgaattgttcagagatactccatctgtttctaaatatttgatgccattaatatttttaaatatgttttattattcgtcttattaaaaaattaaagtaattattaattcattttctatcatttgatttattgttaaacatatttatatgtatacatatagttttatatattttacaaaagtttctgaataagacaaatgttcaaacatttgtttaaaaaatcaacggtgtcaaatatttagagacggagggaatatgtagtacatgatcaatcttcagagaaaacgagagaggagaccttgactcttgactcatcaggtcaatgacactagcatgacacctactgtccatcaagattgtcgtgcttccaaatggtcattacaggattactggagtcagtcaatggccccagacttccgcgtgcaagagaccttcaattcctagtttcttatacaacggagtgttgtttctagcttttttcatgtgattcgatcagtgaaaagaaaatgaagaactttttggcttcttccttgggtacttaattattttagcaagatgataaaagcaaaggcaatgctgattaatgtgattgaactaggtgaaagaatttaccaggatacttaacgaaccacgacgcagtgcagaaattaggatagagttaagagaaacaccaatcctgcaaattgtatacgaaagccagattcgcgtctccgccgtcagggcttcgatcgttggagtagcaagcaaataaagggaattgatagggaatctgtacctcttcttaagaaaatgattggagcctgggaatgattgattcctcgaggtaaccaaatcattcctggccttcaagaatcccgactggtgggagaagattcccattcttgacaggttagggttcgaagctgcggcggccgccaccatgaccagacgcgcgcccccgcgaccgcgaggggagggaggaggtggcggcaacacaggtgttaggaggtggcggcgtggccgcgacgacggagatatagagggactgagggaggtcgccagggtgtgctactttagtcagcaacgtaaccaaataatttttcctttggcaaaactgatatagtatttaattatgacatttattaaacgagaattgattctgcgctctcgactctcgaggggcttctgacatatatacagatggccatatgctccgaggcccgatggcccgcccaaggcccggtgattttggcccggcccaggcacggcatggctcgactcgggtcgtgcccgtgccggcccggctcaacagccgtgccgtgcttgggctgctacctcagtacgctgggccagcacggccctacccaaagttcagggatgcgaaacagacttattctcaaccaaatgtaaggcacgtcacaaagaatagggaggaaaaatagacttattatatggcacggcccaaagagtagggatgtaaaaaagacttattttagctatatatatatgtcacagcccaaagaggagggatgggaaatagacttattttaaagaaggcacgatggaccgcccgtgccttcgggtcgccacggcatggcctgactactagtgtgtcgtgccttggcctgaggtgcagcccgtgggctagcacggcacggcctggagtgttggtcgggccgtgccaccccgatagattctggcccgagcacggccgtgcctgggctgtgccgctcagatggccatctatatacttaagaaaaagagtaaatttattatttctccttataagatatactaatacgtgatactcctaccagggtttcccaaaccgccaggcccggggttaccgcgtcccagcggtaagcacgattaccacattgaacgtgaagagatgtagtctagaggggagaggtgaataggctttcctgaaattttctcaacaaacgcagcggttaaattgacagggcccggaacctcctggtgatgaacactgaaacttccgggcagtgatgagtagcccggaaattccggagttcttgagccaggaactttcgggcaacagagataaacgaaatatgagaagaataacaggtcctagctagggaaaatcacgcacagggttgcacaagatgaagatcacaggatatcagcagattcaaacacagatcatgcacaagagagataaaggtgttttttcccgaagttcggatcacacggatcctactctccgttgaggtgctccaaagagccgggtctcgatttaccccttgcctcacttatgcaaagatcccagaagaggtccacagccttcaactcaacacttctaggtcgttttctagaattgagtgaccaccaagatccaactcacaattccttctagaaaagaccacaagtacaagttgctctacctaggacaacctctgaaaactcagcacaagaatctttactcacttacctcgtttccttgcggaggtgaggaaaaccttcacaaactttcccgggacatccacaagatctttggaagctcacaggcgacacctaaccgtctaggagaagatctccaagagtaataagcccaagtgacagcccacaaggtatccaaagtgctcaatcaaaactaatcttcaagccatctccaaaacactcctacactctcatctaatctctcaatctcacaagataggctctagatttgagtagaggaagcaaaggaagcttgggagtggctagaaaaccctagaacataaaagagctgaagtggaatggccaaagggtgacctggagacgaaatccatatatataatggctaggtgacgtcatctagccattactcacaagtttgaactggaaacctgccaggaggttccgggcaaaagtgtcaggaacttccgggcagcacttaggaaaatttttgctttgaaacggcgcccggaagtttcggccagaacctccgggtagccctctctgtcccggggagaaaatcatttttcaaaaatgattcaaaaaatcttttgactcatggatatgactaagagcactttgtataccctagaaccacacttgaaacccctcttaatagtacggtttttcctaaactcaatttcgaaagtgaaaaacctagtctaatcaccttcggtgtttttcgcacttaggaacattcaaattgggggggtttccttgcattcttagccatcacaacttgctttgggactaaactcctatgaataaacttgataaacacgttagtcccctttaaccatcttgtcattaatcaccaaaacccactagggggtttaagtgcaccttcaaccgcgtggtaaccgtgaaaaaccgtacgaaaccgtgcaaaatttatcaaaaattcaaattaattttaaatttatttgaatttaaggaggttacaatggtttttctattaccgtaccccgcggtaaggccactaaccgtacggttaccgatagtaatgtaaaccctgactctgacagcacaggctcacatcagaaacatataagtttaaattcgactgctagacctacaagttatagatgtgaaatcaaagtatatgttgattttttttggatgaaaaaaattgagttatgagataattggttttgatatttggagataattgtcgaagtggttttgttctctaagcagagccggtcagagggggttttgtgtattggtcagaccaaacaaatattgtgaatagtgatcgcatggtgaacaagattttaggctgagtaaatagtgatcgattgtggagttgaatttggaagaagtctaaatttaagaatattggagtttgaattgtaatgcgataagttggatacttgtatagaaaggttttctagtggattaggactactcgtataagttggattcaatccgtggcttttgagtagccatctcaggtataaaaaataagaggggttaaagcctcttggtatcgatttttatagagactagttgagagaaaaaaatagggtttagccaagattttgagtttagttgaaagttgagaaagaattgttgttgtcgcactttgtaaacacaattaagagcaataaagttgatctactttcctagagtcttcggtttgagtttgtcttcgatctcggtggtcagactgacgagaaggcatcagttagaccgacaaggcatcaccagcggtgtgggctcggttagaccggctgcgacttcagacaacggtggctcatagcctcataaggcagttggaccggtggctttcttctggttagacctacaaaattggtgcggtttgaccggtgatctgacagtcttggactcagccatggactttgtgaaatttaagggcaacttttaattggtgttcctatcattcatgcctctatgtggacttggttttcgggtattcgttcttacaaacaaaagaacatattaaattatagctagcatacattcatattcgttttctattggttaaagttaaatttaaaaatccatgcttgtgcaacgacatatcaaatatttttgtaagtattcggtgacgttagaaaaacatgatcatgacagttctttttgttgttcatatcatacaatctcaaagtctaaaaccacacgtgttcggcactaccggttcccaactttggttgtgttcgtcttagatcgaagtatacattaacataaagattataaacgcttatagcattgtcgattgattagatttagtcttattttgcttatttataactgccgatcgattcacatatgacaccggcttgaagataaatgatatgtcatcggcgactggccaattggctatcgtttatagattttaccgcggtttcttttctctttctttcttgttgattgcaggatcaaaggttccctagcaaaacagtacacacggaaaacggagcggtccattagcacatgattaattaagtattttctaattcttttttaaaaaatagatcaatatgatttttttaagcaactttcgtatagaaacttttttgcaaaaaacgcaccgtttaacagtttgaaaagcgtgcgcgtggaaacgaagcaagggagttaggaacttggagcttcgaacacaggctttctcctctcgtttttcgtgcgcacgcttttcaaattgctaaacggtacgttttttgcaaaaaagtttctatacgaaagttgcttaaaaaatcatattggttcatttttaaaaaataaaattagctagctagtacttaattaatcacatgctaatagaccactccgttttccgcgcgcactgttcccggttggtaaccctctccagtatgagaaggcaacccttctccgccactggatggtctgctgattggcacagtgcagtgacccgatcatcagatatttccatggtcaccatcgataatttgccttatcccttatgcctccatggatgagctgtcgatcgaaaaccattctccaatctccatggatgagctctccttcggaagcttgtgcatggtcgctatggccactctcgccctcgcgttggcgctcatggtcatgggagctcatcgccgcggcggcgagaagggagcaaccaccggagccaagaaccttcctccggggccatggaacctccccgtcatcggcagcctccaccacctcctcggcgcgtcgccgccacaccgcgcgctgctccgcctgtcgcggcggcacggcccgctgatgctggtgaggctcggcgaggtgcccaccgtgatcgtctctgggtcggacgccgccatggaggtgctcaaggcgcgcgacccggcgttcgccgaccgcgcccggagcacgacggtcgacgccgtcagcttcggcgggaagggcgtcatcttcgcgccctacggcgagcactggcgccatgcgcgcagggtctgcctcgcggagctcctcagcgcgcgccaggtgcgccgcctcgagtccatccgtcaggaggaggtgtcgcgcctcgtcgactccatcatcgccggcagcagcaacgccgccgccgtcgacatgacccgggcgctggcggcgctgacgaacgacgtgatcgcgagggcggtgttcggcggcaagtgcgcgcggcaggaggagtaccgccgggagctcggcgtgctgacgacgctggtggccgggtacagcatggtggacctgttcccgtcgtcgcgcgtggtgcggtggctgagccgccgcaccgagcgccgcctgaggaggagccacgcggagatggcgaggatcgtcggctcgatcatcgaggagcgcaaggagaagaaggggagtgacgccggcgtcggcgcgaaagacgaagacgatgatctgctcggcgtgctgctgagactgcaggaggaagacggcctcacctcccctctcacggcggaggtcatcgccgcccttgttaccgtgagtaactgcctatataccctttacatgtttcttcgtctctaagagcatcccagcagatccttcatccggtagtccatccgaaatatagcgcacgggagaagaaaacggcgctccagcaaatacggcatcgaggcctactccaaaaatagacgataccaaatcagagagagttcggccaaagtgattttctcctcatgccatgtctcaacgtctgcgcttccgccctcatctggagttacggatcaacctccccttcgtcattgtcgtcgcccgctggctgccgcagccacttctgcgcccgctcgctgtagccgttgccgccgcttccaatccggtcgcctactcgcctcagcattcgccgccgtcgcctgcgcgttaccacgcccgccggtagtctgtgccacccgcccgcctcagcatccgccgtcatcgcctgcgcggctctgtgcccgctagccacctcggctacttccgtgccgtacgccgcctatgccgcccacccacctcagcatcccctaccgtctcctacgcggctccacggccgctttcgcgcccgccagccgcctgcgcacctccgctcctactggccgccccgactgctctgcggagtcatattagagaaaagagcaaagaaggatagagaagaatagagaaaaagatataaagatgaaatatagtccttcaaatataatatataagtgtatggtagttggaaaatattactaaaatatagaaggatgtgatatggagaatgtaatatgtatgatcggttagagtgggaggggaaatgaaggagaaatcttttttggatgaccatccatttaggcatatggaggatcaaatttggatgagctgttgggatgctctaagagcaaatgcaataaccggtgacagcagttacacgtaggatttttggatgacatggaggagagaggggaagatagagggaaccgacgagtgactaatttgtcaccaagctgctcacgctgccgagattgtgggcccattgtctgtagatggagagcatcatacgcctctggtttccaccatggctgctttgcgtttgccgggcaggcgccttcatccattgcggtcgtcgcccttagccaacctagtcgccatcatctcctatgtgtgtcggacgaccgccctcgtctagcccagcggtcggcgccgaatcgctaccccatgtccactacggtcggtggcatctcttgcgtccaccgaatcgccaccccctgtcccccgcggcgtctcttgcgtccgtcctgacccccgccgacaccctcgtccatcctagcttccaacagcggctgcctagtcatcacctcaaccacccagacctatgctagactgcatcccccatcactgccaccatcgcgcgctgcatctccctcatcctcgccagtggcatccaccgtagctgccgctcttccccatcgttcgcgccactgcactcacccgcgtccccgtggctgccgctcttgcccgtcgcccgcaaggccatgaccctctccccctggatctgcaacggctgccgccgtcatctgcaccgcgccatcgcccgtgtcttgcccgtcgcttgcatccttctagccgccgccgccgcccgcatctgccgctgttgacgcaaccccgctctagcgcgctcctagccatcgtcttcactggttactcgagttgcatcatttgcataagaggaagagaagctaaagtaaaggaggaagaaagtgaagaggatggtgggccctatgaagttaatagaatgttcgtattacaataagatatttctattatatacattggctatattttttttgctataggtgatgtggccatcagtgggctctcttattgacattgctctaactagttactattcaataaacttagtatatgaagttgcatgttcgtttccattactttcctctaaagtagttctaatattatactcactctaaaatataagaaatataaggtataaccacacttaacccaattattatcacctcttagtttggatcatcctactaaatataatgatgcacccaataagtttagaaatcttaaggatagaggattttaaaaaaataaattaatggagagaatgtgctagttaattgtatacatgtcttatctctactattataaaaattgaagatgttttagccggtattttggtacgtcatctatttttgagtcggtttttaagatcgttcgcttttggaaatacatatccgtgtttgagttggattttaaactcgtttgcttttggatatacaaaaggagtcatataagaattctgttttaaaaaaactctgcatgctaacttgagaagaaagtcggactcctaattgtagctcatgattttcataaagaaattacaagcgaattcccacactgaattttaccctagctagctaaaccatataagaacaataagattaaaataacattcacctgttgcaacgcacgggtatttttttagtattatgaaacatataaaaggatatagttgtgttttatattatggaatgaagaagtaaatagtgcaatatgaaatgccccacccatcttttaccgatggtgagtgcaacaggttgggttagtatttattaatctttttttatctgtatttattcatcatttatgggtcattgtcttcgtgtccatcgtttcctcttcctcttccattttatgagtcatgcatactggtgtcactattctgttgcttatatgtggcttgttcccgttggattttgtatttttacctttcactgatatagatatgcattaattgttctagtattttcgtcatccatacactataatatttcaccttttttttaatttgactataatttagacaagtttttttggcaaatcatatggatagacccctaaatattttgaaaaattgccttaataatcaaaacgcatatgttataatatatttaggttatatgctaataattaattttcaggatatttttggagctgctactgataccacagcttccacacttgaatggattatggtggagcttatgaggaatccaagagcaatggataaggcacaacaggaagttcgaaacacgcttggccatgaaaaaggcaaattgattggcatcgacattagtgagctacactacttatgtatggtcatcaaggagaccttacggctgcatcccgcttctgcactaattctacgacagagcagggagaactgtcgtgttatgggctatgacataccacaagcgacacctgttctaataaacacattcgccgtagcaagggacccaaagtactgggacaatgcggaggagttcaagccagagagattcgagaatagcggcgcagatatcaggacatctatcgcacacttagggttcatcccattcggagctggatgcaggcaatgccctggagcgttgctcgcgaccaccacacttgagctcacattagcgaacctcctttaccactttgactgggcacttcctgatggggtgagccccaaatcactcgacatgagtgaggtgatggggatcactttgcataggaggtctagtctccatttgcatacaactttgaccaggtctggtttctttagccactctggtcgatagaggctccatgcatactggtgatccttttttttttgaaacattaaacggcaggagctctgccggatatattagaaggaataaaggttgccaatcattacaatcagcgagcaaagacaaaagcaaactaggggaaagggacaatcagatcgtcgattacagagatagatgataacgactaggaaagctccgcaaagcgttagccattagtcttttttgggagctctatgagatctatgttttcttttattaggtgtgctacttgcagctcggtctgagattgctgattgaaaattcgatggttgcgctccagccaaacatgccaccaagtggtgagtagtgcccctaccatccttttcttcgctcttttttcttgcactgaatggagcatagaatcccaccataccgagatatcttcattttgcggagagaaaagagattggttaaaacctaaccaattgcatagccgattccacacattccttgtgaaaatgcacccctttgccaaatgattcgcatcctcgaaagcttcagaacaaaggctgcagatccagtcgcaaggcaaatgtcttcttaacaaattctctgatgtgagagttttttgatgtaaaatgagccagccaaagaaacgttgttttggttcagcctgtgccttccaaagaggggagaaatttaggtttgtggttgttccggagaattgggcttcataggcactttttgttgtacactctccattcgcagtccacttccaaaagatgtcatctggcacatttgtgttgagcgtgacctcctgcaggtagcttccaagccgcaccagggcatctatctcctctatagatgtgatgggattaaggattgcaagccagtgattattttctaagctgagctttacgttgttgatctttatcttggaaagcctgaaaatctctagggcaatatttgttgggatatgcgtaggctacgatagcataaatcaaaattttctatcgcgtaaaccaggaaccatgcaagtattagatcatagattgttaccactcgacgcgctgcgcagcggaagaagacgctgagaagtcgaaggaactctcgcgaagtagcgcgcgtcgatgtagaggaagtagtcgatcgcaccggctcgaccttctcctcctcgtgcgttctcctcgccgtactcccacgccgatcagcaccgcaaactagcggcgcctctaccggtatccacatgtacagggacggaacgccacgcgcagatgtgctagcactcgcgcgcggctagggttttgctcggggagggaagtgacggctagggtttctcacgtgattcaatgcctctgccggtcacacccctcacgaatatataggattcatcactcgggcctccaaggcccgtagaactcctattcggatccctatccgaattaagcttataatggatctctatccaatccccttattccggcccattaagcgtgcgaccctgtaggttcatatatactcggttgtaacccgaaaactccttttcggtccacgcttcaacagcggcccctagcagaacgtattgacccaccgggcatacataaagatcatatcggctgaacctctagtgtacttgtatgaacccctttgcctcacgatatcgattaagctcaaggctagatatgtgccatcctctaatagctcaatcattcactcaaacctgttgatagattatataacttgtgattgactcctcaatcacctttggcatggccatgcacttccataatctacaacatcgaggggcccagagatatctttccataggaggggcaaatctcatcttgattattcgtatcccactacatatttcatagcatacccgaaaactacttttataactacccaattacggagtagcgtttagcagtccctaagtaatctactacacatgttgagaaccatgataatctcaggtctaaggattcaacaccaacactcaatgagatcactgatgacataacacatatggctcttgcagtgtctcatgttgggtctatccaacaacatgttcaccaacatgtgtccacattattaatttggtatctctataccatgatccatgagacatgatcattaattaatacttgtgctgatcatataaacatatttgttccacatatgatatttgatcagggatcctttagaaatagcaacacataacataaagagtctcatgaaagaatcacatattcattaaccaataatgagttatctatttcaaggaacaatgtcggataaatatgtaaacatagtatgtgatacaatcatctctataattgcctttagggcatatcactaacaatatccttgggcgattgtcctagtagccagttatcagaccaaaaggagcattttcttccatcccccagagtaatcactgttccagctctgaacagcactctatccagatcattacaaggaagtcccattccttgccaaggcctgtgttcatctttccagccaaaccagagccaacgcagacgcaatgcacgcgagaacttttccaagttaagaatactaagccctcctaaggattttggtttgcaaacattctgccagttaacaaggctgctgcctgctcactttttcagggtcgtctcccttccaaagaaaagcccgcctgagacaatcgatcttcttgtaaagccatttgttttgatgtaggactgtgaggtgataaacaggtatcgaagagagagttgttttaacgagggtctctgcctgatgaactggtgatcctttggtatcgcctaaaaatggtataacttgtgaagttgcgtttattcatatagtcatagaaaacttcggaatgaaagcttattagatgcatgtatgaaacctctagccagaatcagtacaagtcagtactgtactaggcgtgctacatttgaaatgttattttgggtttgattctatgcttaaatcgtttgttaatagatatcactagtcaccaatccgtgtttcatggctgttttcatgtatattttaaaacagagtaatgtgtacgggcggtccttaaacttgtagtgatgtgtcatacagatttctaaactctcaaaatgcgtccaagtcccagaacttgtcatagtgtgtcatctaggtcccaaatcgccacaaccccttcaggatcctacatggcgttgatgtggcatgccacacggaatgacgtggcatcattttgactgacaaatgggtcccatttaaaattttttcttctctttttttccctttcttctcctttctgtgtgacccgagcagaagaaaggaaaaaaaagaagaatgagaagaaaaacgaagaaaaagtaaaagaaaagaagaaaaaaaataaaatgacacggcacgtccatgtggcatgccacatcagcgccacgtaggatcctagaggggatgtatcgatttgggacctagatgatacactttgacaagttctgggatctggatatgtattttaagactttagaaacctatatgacacaatcttacaagtttaagaaccgccaatgcactttactctttaaaatatattgaaaaagatatgggacctattcggtgcagcttatgatgtgtctgtatactgtgatacagctgcagcagtaagctgcactgaacaggtccatcgacttgtactagatctgaagctgagcgcattatgatcgtgtgcatttgtactctgcttctcaaaaataaaaaaagaaaagaaaaagattttttttgtctgaattaactttgcaaagcgaaagagaagaaatcaacatgtatatcgaaaaagagatgtaaggtacgtgatgaatgatgctccctcatttagaaatgcatgtgttttagaacacaatttagtcaaactatattaactttggtcataatatttcaaatggtatttgaattttatatatgtataagcgaaagagaaaactatactagtactttgcaacggttacattaagtattgaaaaacatgttcaagaccaggcgttattcaactctaactaccaaaactgttaattttcaatcttaattagattagatttcgaatggatttaaatgacatagaaatatagtttaataccaaaacaaaaagaattcttcaaaatattaaacgtatttagaaaattcgaaaaaggtaaaccgttggaaatttggagtatatagttattaaaagttcaaaaaaccacacaaggcagaggcaagtggaatggaggcaaaaacgtcgacagcaggattcgaacctgcgcgggcagagcccagtagatttcgagtctacctccttaaccactcggacatatcgacaattgtgtacataatttttctgtcctgattttaagtaaattgttttgcacatgtttcatataacatcgctgttcactgttatgtgcttggccgttggcaaaggtacggttgaagcagttggagccctcttcatcccatatatttgttgttttcgttaatattccagcaaacaagaaattaatacctcgtgtgagacagtgagatcgatgataattcagagacaattaacaaaactagagatcacacaggacgatgaatactactactaattggaaacaatgaccacggcaaatctgctactaacaaaatcgtctaaatctgcttctaattcgttttcatgcatgctacgagctagttctggtcgccggcgacgcgccggaacgagagcaccttccacgtccaccccgtcgacccgggcacgccccacaccaccgcctcgtacgtccccacgccgcccgccgcgcgcagcaggagccggtagttgttgccggcgccggcggcctgcacgctcccggcgaccacctccaccagcgtcagctccccctccgctgccccgaacgccagcatccgcaccaccagcgcgaacctcgccacctgccggtacaacccgtcgcccctgatcacgtcgccgccgatcgggacccactcgccggtcgccgccggcgccggcggcaaagaccctgcatctcctccctgcgcgccggcgccggcgccggcgacgacgaggaggaggaacagcgcgatcgccaccattgctggagagctgctcatcgtggccgagctatacatgttgttcacttcttctcagctccaagcttagctccaatggcgatagctagctagctgcagctttgcttatttatagtggtagcttagctagggtttcgctcgccgtcgacatggaagcttaagcttcttgaagagagtgatcaaggtcagctggcccgacgaactaatgaatcaattagatcaccagctggcattccaatcgacgaggaaaatcaatcttggcagtattcgtatcagctagctgttgaggtgtaaaatcttcttgaccagaaaccgatacctattttcatgggtgtgttaggttaattaacgagttaattcaccctccaaggttggcgttgacatttggaagtgtgccttgcatggacacactatcctcatgtatccatattcatatatcaaagtcaaagatggaacctagttcaattatccgtccgaggtcgcagaaaaatcggtgttgggatgcagtttgtcgcacgatttcgaggctgatttgtggcccaaatcggcccatgaatcggatgagatcagaggagaagaacagagagcagagcagagtagtgaattgctctgtttttataccagtcctgctgttcatcttacaatgtgtgtgacattgtgaatttgtgacctgatccttgaccgttggatcaccatccaactgctagtggcttcatggttaattacttggtcatgcacttgaccaagttttttttttaaccatacttgactaagaattttgttcatggagctttatacgaaaataattgtttgaaaaaaaaggggaatataatcttgtttggtgaaacagttttctagacattttggtttggaaaattctttattttaatataatgctgaaaaaacagtgttatgaagttttgaaaaaaaaatgaaagagacataacagttggagagcatatattatctaatcgtaatttgatgagtaaagcaagctataacaattgaaggcaggtcctctgcagtgctgcagaggatgtctattagttattactacctctttccctagttcctaaattgattatcatataatggaattcaaaatttctcaaattgatcatcatataactgcatggacacggatttcatcataatataactaatacaatatgggagaatatgtgcatgctaaggtgtaattagcatggtgttttaatcgatgcatgtattgtgggagaatgtgtgcatggtgtcttgattgatgtgatttaaattattcttggtcttggtacatatgataatcaatttagaaatgagggagtatatgctttattttcatagcgactactattataagttttatataaatgctcagtttactacagcaacgacataatgaacatttatgtatctctaccttctctactctcactctcactctcggtatctccctctggttcacgtttaagacaatgacatggttttcaaaatatatctttgagtatatttttctattatgatatatacaataaataaatatttttttattttattatattattttgtaagacaaattcatatatgttgttcttctgcctataaactaaacgtcaatgatagtcaaatttatagaattttgtccttaatcttttcaaaacttcaagaattatagaccagcgggagtagctcttatagacttatgtgattacatatgaagcaaatttatcggtaaaacatggcagccaatgaaaaaacaaaggagctgaggactcatagaagccaccagtcacaacgaaagaacaagacccttgactgggctggatgcaatgccattactcattcctccgtcggtttcatattgcaagttactttgggtttgtcctaagtcaaagcttttaagtttgataaaaaatattaaaaaaatatagcaatatttctaacactataaatatactataaaaatacattcaataatagatttaatgaaactaatttggtgttatagatgttactatatttttctataaacttggtcgacctcgaagaaatttgacatagaacaaacccaaaataaataatttatagaaaatgtgtcccacatgtagaaccatacagagatacatcattcacttgatgtaaaaattgttagctttcaacaataatactattgtttatatgcttgttctctctcattctttacatattttttctgcacagaaatatttacatgcgattcaatctgacaaatgctctatttgcctaaactttatttcaaataacttgctcaaaaatcacttcagaaatgtgttggtcaagcatatgtggtgagcaattggcagcatagtaacagcttttcacaatgctcaagaaggtctgcttggttttgttgttaattcttctatcatcaactcttggaagaagatattgagcaagttcttgcatacccaactcaatttccttgtcaatttgatttattgttgtctcatttttcttggtatcctacaaaattgtatcaacagttgagtagctgaatacattgacattgaagcaaatatagtaaatagaaccatagctctgatgtaactgctaaaaaaaaaaacttcagtccttggagatgccttgagagttagaattatcttttgtactgttacttattttttacctcttgacacctattcgtagtggtacctaggaggtacatctacattgcaataacccccaaggattgtaagaatttcatatatttatactgaaagtgcattgttcaggaccaaagtaccgacttgttatcatgttacaacatctatactggagaatatataaaactatttattacaaatgctgatttcatttttataattagtttttcatcatccaagtgattataacgtgcccaattcagtgaatacagcttgtcaagtcggtgagaagtttttatcgatgaaactatactaacatataaagttttacaataaactttctaaccactatacacataatttgatcaaacaaaaaacaacctacaccattctttaatttatataactactgcaaaattacactagtatcagaataaaactctagtcaacagactatgtaatgtataagagttacctgtgaaagtaacatcttggcatgaagagaatcgcaaatagaggaagcaagttgaataaaccaagaaccttcggtgttatttatcatagatgctgcctcctcaattcgtccagcacaaatttcaacaatttgagcaataagtaaacatgtttctttattatgaacagtgcatgaccctggatgcataactctgcctttgtcatatctgccatccttcatattgatttgttgcatcatccattcaatccactagaaatgcaaacaaagatcttagcatttttctggctacaacactgtaataagaagtttatagttatgttttacttacagcacatcttatgagattatgaatacacttttgaccttctcgaactggcggtgtctcttgagacaacaaatctataagttgacaaagtgtcctcgcaaggattccatcttttgcatatccttctagcctgaacgaacaattttaagttaaatactgagaaaaatcttagtagatttttttacattttatggcattatgataagaattttctagatacatcgctacattgtaatatgtggtgtactccaaggcaagcattcttctcttttattatataaaaaaaatataagcattatattaggctggatagaacaaataccaagtttggaatattcttctgtcattttgtaataatcctatgatcacaaattgttcttccaaataattctcaagaaatgagttcatgatctaatttatatttaccaaatgttttttttaaacctatatatttaccaaatgttgtaaaaactagtccctcttaaatggttgtaactttcaacattccattttaatgcttttacgtacttaccttcctttactgttttccaggtgaaaaacattagttttcctcttattttaagagctgaaggacaatttgtgctcccttcaaataaaaaaacctaatatattcattcttttgattgtcaaaatagaaaccatttaccattcaattcagcttcccatttttctcatagagaggacaagcatcagaagcaattagtagtaactatccataaaaaaacccatcatcatgctgcacggtgcaaaatcataatttcaaggaatttcagtttcgcagtactcaccccaaaacattgccattttcttcatagaggctgctccacatgaaacgctccatccttttcatgcttgacatatcgctgtaaaaatgcctagaaatagtgttggccagcactgacactctagcccatgcaagtcgctcagaggcacggtttggttcgaaaatgcacgcggcagccaaaaaataagctctcaaaacatcttcaggtgtcatcccaaaagcttccaggccattctcaatgaaccacctaaatatatatttgtggtgccaaaacaaattttatctttgtttaagataagttcacagaggaaaatgtgtggtgaaacagaaatgaagtttatggagttgatttacttttgtagaccctgcaactcatgctgatgtagagcttgacaacggttgaaatcctgtttcgccaactcgagatatgtagcgttattcacaattggcatcctgacaaaaggcacccaacaattatcagcaaatcttaacttcaattattttgaagataatcatattgaacaatgtttgaagttggaacaaagttgtgaaaactttaacctgtagagtgtctttccaatccagacgtcatcatttccaccatattgacctatgtatgttcttgcctcgacgcgtggcaagctcgcataccaaggaaaatctagtgtgtattgtacctattgattcagtgcaatgttatatcagtactcaggaactggtaaatatttgcaaagagaacaaatttaaaataatgtactatgaagtttataaagaaattatgctacaatcaaaagtaactagattatacctctcctggtaggtccttggagatgatccatttatcatgaagtgtcccctgggcttctctttctctaaggaactcatatgagaaattccttgcacgctgcaaaatgtcttctcctggaaaacttatctgagatgctctgttcaggttatacatcccagtgactgcttgagttgattgccccacaaaacagaagaactccccatccttctcaaaattcttgaacacacctgaatttacaatagcaatttgtgattcagaaaaggtaatatgatcttgaagcgtaacacgatacagtttttcccaggatatgtgatttcatctgaatttgaaagaagaaaaacagctccatacttggtgatacattgtatccatggaggcgtagtagacggaaagccatagcggtgtcatccacttcttttacattggagttcctagcccagcaaatcccatcttcagtccagtgcctacacagtgagaaacacaggttaaaaaactctgctcataaggttcctaaagtaactacagaagacaccacacatatcagtttgagaaaataattgcgctaataaaacaaaacattatgaaaaacctgttgacatagtccatgttctgttcaatctctcgttggaagtaccgcgatatcccaagacgctccaaccgatcgacaacccatatgtgctcaaaaagatcgaccgggtaaacgttcggaactgaaaaaattttcaacatcacatgatctgagatcagctgccacaaaatggcacctagtgcactgtagcaaaccagatttccgaaacattggtcagtgaaatgccacgaatcttttaccgcctccgtcgaatttcttaatgatcctgtcgatgtacgcgaagcatttcttgtcaccggtctgcatgagagcataagcagtagctgaaggggagaacaagaaggatccatcactgcattggagcttcagaagcctctgccaatccagcccaggcatcccttcaaggctatgcagaattgaagttgggactatatgcatcatgtcctttggaatcctacattgtgagtttttgtcaacaaaagacaagcgtcatcaagttttaactagttaagctctccaatgtttgccactatatacatatcttttgtaagataatgaaagtaacttccgatctctgcaccaactacagatgcacgacagcggtcacgatattatacatacgacgcgtatggatttatacctcttaagcttgagttctctgtttgcataaatgcccttgagagcagggtgatcatatgggaaatcaatacccaaacccctagctgcctccacaagagaagggaatgcaatctcaaacccaatcggcatcgtatccggctcctcctctgctaacctccacaagttcagattcagaaactgaagccctgaacaagagcaaaaaattcagaaaacatcaacatcatctcacacattgcctcacttgcaatctggaactaactaatcatcaccttcaaattaattactccctccgtcttaaattatagcaacttagcactaccggattaaacacaatctagtactacgaatctagatgtattagaccgagggagtaaccaacaatctatctgaaactgtaaaaggattgttattaaataacagtctatctcacagactgcattaacaatctatctgaaaaggttggctgtgtactttctttgggatgtaaaagccgggttttatataaatcctttatctagaaaacaatctatctgaaaaaataactgtaacaaacctatctcaaactgtctatctcacagactgcattaacaatctatctgaaaagttaactgtaacaaacctatctgaaactgtaacacaaagactgtaattaactgaacttcactaatctgtgataaatgaattattactgatgataccttgcttgcactggtcatggtggagggaccatctggtgagggcgacgacgcaggcgagggtgttgatgacgcggtcgtaggcggagaagagcgcctcgtcgccccacgacccgtcggcgagctggctgccgacgatccaccgcacggcggccgggaactgcgtgccgccctcgccgtccagccgcggcaccagcgccacccacgccgtgtcgtacgccgacgcggtgatcgcgccgtcctccatggacgacagcatcgacctcacctgctcgaccagtggctgcagctcatcatctgcctcctcatcagcctgacgtaaacaaattaattaattaatcaaaatgtgcttaatgagattacgtacgagaagaatgtgaccatgaatgattactgtaagaaggtagtggatgattcacctcgttgttttgttggtgatcgtcgaggtcgcgtgattcattgggccatttcgtgatccggggggtctcatgttcgatgatgttggcttgcagccctgcacatggattacagcatttccatttataaatgccaaaagaaaaaaaagaaaacagcatgatttcatgagcaaagtgttgagtatcgcttgtatatggcgtacgtatgtgccgcatgtttttggtatagttttgtgagtagaagtttttagaattaccaaatgttggtaaggattgataaggtcgtgtgatggtaaagtctcatttagtttgttgtcttaccagaatttgacattgcaaatcaaactgaacaagccctaaaaatctaagagatactatttttcggaagcttctggaccattttgggattatctgtaacaaaaatacgagacaacgacattctcagtgggcagaaaagagaatccaatgcagttggcctgttgctctggcaggatccaaatcacagtttggattttggagtatacatagaactgaagcttatatgcagtttgaacctctcaattgagagaacatataatggcctcatcggttggcctaataaaccaaggcaaaagtcaaaatttaaaatttaaaatttaaaatttaagtttaaagttgattttaagatattttcaacgtagattatcgctaagaataaatatataaaagttttacctatagattaatttttgtttctaataaaccgttttgatttattagggaatatgggaacagatgggagtaagtttcaatgtcaactgtatactcgaaggatgtaggagtatcttaattaagatatgtatcctaattaagcttcacttctctgtaattaagcttctgtgagctgcctctattgatcgttgtaactgcgcacgaggctcacagcatttaaagtttgagaaagttttgatgatgttccaaaagtatttcccatttttaagcaactagccaaaaaagctctaccgtttactactattagatgaggaagaatacaacttttattaagatgttactaaaagcacgtcaaaaaatagatgttactatcacattaaacttttgtctctcttaaatgatgagatgccgtttttctcacctttcagcattccggagactgaaaactagacaacctatttttgtattttcacttgatcagcgtatcccaatgtcaaatacaccttgtccaccatctaaaaaatataaggcacaaaaagttcatggcatatatacattaactagcacatcttcctctaatttcgctttgttttaactcctctaccatcaaacccccaatcacattagttgtatgcatcgaggtgattcaactgagtacgtaattaatttttttcttggttttttttagtgatggttgtgccttatattttaggatgggggagtacattaatttgcattataaaaaaatattgtggagcccaactaaattatacttgtacttcttcacaaactaataagtcatcctatataatacgtgaaactatagggcaattcaaaatatgaaacctaaaggcattggagattcacgagagctagcccaagtatcaagggcaacatatataattttattgactaggatcgatgggaataaatattatattcaaccatgcatttcttttgctataatctcttaacatttattctcagttgaaaaatcttaggattcatgaaactgacccctaaatctaatcctgtatctgcagtgctagtctgatgtggcaaatctacgcgacacacaacgtcaagtcccagtccaagcccaatcgatcgaatcttgggccaattttattcgataaccaaattgatatgctggccatttggctaaagcaaagcatgccttacaaagagaacaaggtcccccagaacaaacccgtacatcaataaaaaaaattggatagatacaaacaatcttgcattgagatttttttgtaaaattcaaccgatcaacagttgtgatagtaacaacgaataatgatgctggattctggtagaaacaacgaataatgaacagtctaactcgcagtgaacagctttattaatttgacagctgctggaaagataaatgcgatatatgccaattgattgcgacatcgtacgatatatttgaatccacacaacactgaatggactgcaagagcgacgacaacactaactagttgcagaataggcaattgatttgttcttttttatcttgttggttctgtttatatatcatattaatttgtcttcagcatttatgcgtttatggacgtgattggagattaacttccaaaaactgaatttcggagacaaactgccgttcagttttcgtccaatttgatttatcactattcctagaaaaaagtctgtgcattgcaacgggtgaaacctattttaatctttttattgttatatggtttagttaaggtgaaatttactttgaaaattcgcttggatatatatttttctagaaaatcatgagctgcaattagaagtcccatcatctcaagttagcatgcaagttttatatttcttatacaactccttttgtatgtccaaagacgaacaaacttaaaacccaactcaactacagatctatatttccaaaaacgaacaaacttaaaaaatcaattcatacacgaatgacgtaccaaaatactggtaaaaacatcatcaatttttataatagtagagatataagtaaaaccatggttcttttaagtgaatatcacacaatgcaagattgttgtggtgttatacaaatcaaaccatggttcaatttttataatagtagagatttaagtgaatttcacacaaaagattattgtgttgttatacaaatcaaaccaaggtttttttttctgcaaattttattaaaaaaattattgcaccccaacgataatactttaaaagatggtaactgtttacaaataattattttcaagatatgctgacagcgaggcttctcttctgtctccataaatttcaagatatattatactccctccggtttcattttaattgatgctttgaacaataacacgctctataagatatacctttgaccttatttttctattataatatatacaataaataaatgcatgtttacttttattatagtgttttgaaagacaaatctatatatgtttttctagtttctttaaactaaatatttttaaagttattgatggtcaaagttataaaagtttagcctcaaccttgtccaaaacgtcaattaatatagaaccggagggagtattagttcagtgtttggaggtggtcatatgagtagggtatgtgtgtatgtgcatttatatgagtgcccgcgtgtacaatgtttcacaaaaataaaataattatttccagttttttttttacacaataaggtaactgtttacataggtaagaggcggtggtgaacttgattgtacttcatggcatgcctaataattcagaagtgtcaatcaatcgctacagataaaaactcacgtcattttaagcaccgacataatctcaagctgtgtgtcccgagccactaatttaccttactataagaggtaatactttttctatagaaaaagtaaatccgccaacgaaaaatcaactagctttatatcctcaaagtaacttctcaaaaaattctacccactttatatattctctcccgagaacctccatccaaactaaatctatctctgtcctcctctgttcagtgactatgcatgaacccaaagtccacaaaccaaaaaaacaaaactactttttaccctcatcacataacccagcgtcacaacgcagttgatcagaatccttcgactatcgtaaagtcagaggaacgtaatcgccgacatatatagatcctactgttcttcgatcgggttcatatgttcagcgaccacatcaatgatctttgaaggagtctcttcctccccccacacagtgtagatcatctatgtacctaaagtgatctctgaacgaaactaaagcgttggcacaaccaaaggcagctgctcactaggctatgcaggtgcaggagtgcagtgaataaagcatgcagtgcactcactgactcaccctcgtcgacgacccggaaaacgacaagaccaaaagcggcggaagaaagatctctcatgagcccgtatactacctttggctgtactgctggagctcgacacgccggcggtggtggcccgcgccctccacgccgctcctcctccgccgccgccgccgccgtcggcgtgatgatcctcgccgccgccgtcgtcgccgccgcgccgccaaacgcacggacgaagatggccacctgcacagagagacgacgtaagtaattaaagagatcgaccgatcgactgaagaaacgtatagaccggccaagatatatcgaaatgcacaaccacctttagccaccggagcgcgggacgacgacgaccatgaccaccgccgccgccgccgccagtccgccgagccggcgccgccgaatgcggcgggcgccgtcggcggggagtggaggtgaatcatcgtcggcggcggaggagggagtagagagctcgtcggagatgcgcgcgagggatggaggaatggaagacacgagtagagaggaggatggggagatgatggagatgcgatgcgggaggcgagagcgagttaagcgcggggggatgcagtgcgtatatataagtgcagatttagcaaaactagttagccccatacctatccaaacctgcctatttatagcccacttccctcgccattaccgctctcttaaggataactattacgtatgcacaccacgtgtaccgtgcatgcatgcaaacgtacgtatacacaccaaatgtctcgtacatatatatctatcaccgacgtatatacagcaaaatatatatgtagtgtaaattaacctgtaaactatcgtcagagatatattcatgtcagagtaagtaatcttttcacttggaggacataagactttttgactttagccaaagttaaattgtttcaagtttgactaaatttatagataaatataataatatttataatactaaattattttcatcaaatcaataattcaatatacttttacaataaatttgtcttggattgaaaatattactacctttttctacaaatttggtcaaacttaaatccgcttaattttgaccaaagtcaacctgaaacggaggaagtacatgttttcttccgtacgtagacgcatgtacctatgcatatatacctatggactatgtatatatatacgtgtatgtatttatgtatgtggtgtgtagcgatagcgaagggcgagaggggcgcgcgaatgattcttgcggagagaaaggtggggtagtggacaaaaccgaaagcttaattaaaacgtttttgtgataatattttattttggtagtgttaatgggtggtcagagagggacattcctcggaccttatacacccagatgccgctccgtaatatgcctccagatcgagtttgttcgcatgcatctcttcagtcaaaaattacatggagatcctcaaaattaattaagacagagaaattaattcttgtttttgtttggatgcatgtcacgcgccaaacgttagacacgctacgtttttaatttgtataaggtgagtgtttaatttgggttcacctgcttgctacaactgggcgcatggtatacttgtgagttgtcccttgtctaacatagtactaaattatttattaaacctttgcataagtatatatgattaacaaattattggtcacacttgcattaagatttgacataaaactgtgccaacgtgcggataatccaaacatatatatatagtaccgtttgaatgttctcaaaaaaaaaagaaaaacgtttgaaatacaactgtgctatgtagtattgtactataagataaacaaattaaaaacaaaactagagtttgttataatgggattttcttcaaattctgatctgatggttaagccttactttaggatccactaaagtatactagatgaataccccaccacattactgcggaaaattaagttgcataatatgtataaataagatgtaatttgattatcaaaactaaaacaattttgagcctaaaaataattgagattgcatgtttttaagagagaagaaaaaagagacaatttggaccatagatctatcatccaaaggctagaaataattggggtgatatggcttaataagaaaagagagaaatatcattaactacacttagtgaggatgaactatataagtatataggattgcatctccataatgtatatggtaagaaggggtactaaagtagataccacattttaataaattatttatcatcccaaccaacctcttctcccgcagcatccgatttttcctcacaccatatcccaatgagagcacctcaatggaactcgaatggattaattcaatggcggtggtcgtggacatgcacggattcggggacgacggttgcggcggtgctcacgtatgcgagtggatccgataaaggcaatgatatggcgtagggagcggaaggatccaacgacggcagtattggtacttgcggatggatctccggcggtggtaacaatgcgcttctggcaacgtaaatttcatgcatgcaggtgccctttgcggtgtttgctcccagggaaaccgttttaaacactcgggtggacgtccatccgtttttttcatgtcatctaaatagttataaaaaattttcgaaaaaaatgacatgataggttaacatgtaatatatcatttcacaaacatgcaagttcaaattcgacttctacaagttgtaacaaaaataataaatttgactgtgaatatacatatactagttagagtttaatttgttatttttgttacaacttgtacaagtcgaatttgaacttgcatgtttgcggagtgatatattacatgttaacccatcttgtaaattttttttctaattttttcataattatttagatgacatgtagattagaatccatcgctccccgccttcttccccttttccatagctggctccccaccttctcccctcgcccatggcagcaagcaactgtgagacagagtagcagcatcataagggagggaagagtgaattttctattgtttgtggtcggctttatgtaaatggttacgtcaaccaattaatagattcctataaaattattcacacaatatataaatagctcttaaaggtttaagacactttctatttttacattatggaatccataatatggatgtactcatctttatatcctctcaactcctagtacagtagtactaaggctccaacccaagcttcttaaccaaccatatactccctctatttcaaaatatttgacaccgtcgactttttagtacgtgtttgatcattcatcttattcaaaaaatttaagtaattatttattcttttcatatcatttaatttattgttaaatatactttcatgtacacatatagttttacatatttcacaaatttttttcaatacgtgtgcaaaccactaccacctctcctgccgtacagcctacctactaccatggccctctacatacgtgtgcttaagttagtccagtggtatacacacgagatgcgcatatgtaggcgtttatatataaactcctacatgttaatagtggcaccggacaagattatagcaccattagttttctactcattctgctttaaaatatataacatcgttaacttttgaaaatttatttgatcattcatctcactagtaactcaatacaaatattaaaaaaaatataagtcatgtttaaaaatatctttgatagtgaaacacatcacaacaaaataaatagcacgaaattagacctgaaatccgaaagaatgaatatttggcttgaactggtgtaagcacgtagtaataagacgaaattaacatgtaggagtttatatatacacctacagatgcgcatctcgtgtgtataccactggactaacttaagcacacagtccacttatattccttcccaactgatctggaaatgaacatcaatcaggaattattatatctccatattaaggaggaccatttagccatttctttactaatttttaattagaaataaattaattaaaacccctataaaatgcgtcgtatgtttcaaaataaatgaagcaacatctctttaatgacttttcttaagagtaaatttcacaaaactacagatatatgctttaactaaactataaaaaaaaaacttcaaatttaaggtcttgtatcacaaaactatagatttaccttgaaatttctcacaaaattatagatttaggaacaaagtgtcccagaataaatattaagtaggaaatttatcacaaaactacaagtttagtatcaatttatcccgaaattacaatgtttatagctccaacaagagaaaatcccttgtaaacccctaaaattttatctaatctcttctatacccctgaatcttgcttacttccttatatacccctaaaatttgattttgatcccttccatgccccttctgtcagttgaccgtctaatttctataaaaatgaccattttaccctttgaatgaacatagaaatttatgaattatattattgaaaatataaaagtttgttgcatgagactattatagtgatgagtttgttgtgcgatatattatttatgaaaaaacatatttttagataatgaaataaaaatatgtatttattttattttttaaaaattcataaaaattgaggagcattcatataaagataggactacaaatgctcacgatattttttatgaatgctcccgataaaaaaatattgtcctattaaatttcaaataaaaaattaatttattacatttgttttattttaaaatttatgtcaaaattttccgcactaattatttagtatcggtagttacataaaatgcacatgttgtgcattcaaacaaaatttcaatctttttcaaggttatattcaaacctacgtcatcaaggttattaaagacatttgccaccaaacttaatagtgagatgaaggaaaatgtaacggcagggtcatgaaagagatcaagttgaaatttcaggtgtatagaagggatcgggtaaatttcaggggtacaaaagggattgagtgagttttcgagggtataaagggaatttactcctccaacatagtgttagtactagggatttaaacactagatagaatctgtagttttgtgataacttcaatattacattggtagttttgtgataacttcgatatgaaatttgtagttttgtgatacttgaccttaaatatatagttttgtgataaattgactgccaaatttgtagttttagggggtgtttagatccatgggtgtaaagttttgatgtgtcacattgagtattttatagggtatcacatggggtgtttggacactaataaaaaaactaattacataatccgtccgtaaacagctagatgagtttattaagcctaattaatccatcattagcaaatgtttactgtagcaccacattgtcaaatcatgtagtaattaggcttaaaagattcatctcgtaaattagtcgtaatctgtctaattagttatttttttagcctatttaatagttcatgtaggtgttcaaatgttcgatgtgacatggtgtaaaatttttgtgtgggaactaaccatggccttataacacaacgttttaaatctatagttttacgatagtttgatcaaaatatatgtaggttttgaaatttacttttttttaattataggtcgcgtttgttagggttgctaatggagctaatgcccatcaaacagtacaatatccaccgatagatatagtgaagcaggttgattcctaatctcctgtatggaagacacacaggccatcacaatcatttacccacgagtacatatccccattaatacacacccaaacaaagatctaggacaaatccacaaatttcactaaaattttttgtaacgacatatttacatgtgtgtaattgtagtcttgataaatagagtaatgcacgcacaactttaccattgcacctcttatatgcccataagtacttatacaaggaaaattttatgttcttaatgcagtcgtatatatattcgacctaatttgacatggttatatatatatatatatatatatatatatatatatatatatatatatatatatatatatatatatggaaaaagtacgaattaccccccgaactatcgcgatcgtccgaattaccccctaaccataaaaccagacattcttcacccccaactatacaaaccggacgaattaccccctcgacccaatccgcggtggttttggtctacgtggcgtacgcgtggcagcccagtcagcattctatatttaaaaaaatgtgggacccacctgtcatactctctctctcacctgttaaaaaatgtggtatttcttaactacattactagaaatataattcccagcaatggcgcagaaatacttctagtatattatggttacagagttcatccgcaagcgcacggatatgctattgtagcatttcacccgagagtattccaaggatattgtatttattttatcccgtgggaagattatgtagagagaactcaactaataatttatatattacttgtaataatcatattctaagcaggggttaagataatccaagggtagagtgacacacaagcattaacaactcattctcgtaataaatgatctaagctaagtggaaagaaaagagaaagaaaatcttttcctatacttttaatatacatagtatacatacattctagttaactgatatactagctaataccatctatccgatgccctcctggtacttcgagaagccacccctgactgccgagttccttacgacagcccgtcatgaccatacaaccggagctaaatacggaggaataccctccccaggaaattaacttaggattatataccggcacagaggaatacccgtactgagctgtcaccatcagcggcccacctctcatccataatatataaccccaaataatgatatcccgtaatctagacaccacgtctaaactaccagatactaatctagacaccacgtcatgacatagagtaattgcataagcaaacattatacccgcaccaaagcatctcccagataagctagccgtatattcagtataacatgaacataatataaagtaggtactcatatactcggaaagtatttcaataccataaatgtatatagaagagtattctaataaaagtacaaagcttacaaaagaggaaaggaaagctgctaaagccatacccgaactcttccgaagacttccggactccagatttctactctattcctattccaccagctagatactactaaactaaacttgagagaaatgagagagctattgcttgaggtgtgtgttgaagtgaagagagtgaactccttaaataggcaggtaatgacggttatggcgattggaaaggtcggtaataccctccaaccgccataggggagcaatccacaccgcccatccaaaccctgcatccagcggcttcacggcaggttcggccgaacccccaggttcagccgaaccaggggccggcccaaccagcccacattttggctggtggtctcgtccgctgcttcacttcatagacttatgaattttggcccaattcatcgtgtcaattttgagttcttggcccattcatacataagtctggttatcgacatcgtccgattgatgtatcgtctgagttgatgtcgattctccaacactttattgtcattctctgcaaaaaggttattctaatactagtagaatattattattctaacagatatatgcattgcaagcatcactagttctcctctattttggtaatattgacggtcgaaactgatcgataacgaccgtcaacaaaaccccccaagcttgaacctttgctcgtcccgagtgaaggacgaaaggaaacaaagacttggttgttgatcaggagttgctactatgctgcatatctcaaagatacaggtgcaaggtatatgtactctctatcagattaaataatctttggcacggtggcttacctttacccctgattctcatgagacactgcttctcattgccttgggtggttgaaagacagaacagcaattagagcaccaatcacccaatttttattcaactcttattccggaagttttcaaatgattttgcaaaagaaagccaagttcctcaattgattcactcagcctctctaagtgtatcaacatgaattcctcaccaaatgttgccttgttgattcctactctaaggtttatatgtggagcttggtaggggtcaaacatggcatacttacattcacatttattactaagtcaaaaacttagactagagcagataactaaacatactcaagatgaagattgtgcataatgtgtgtgtggtatatagtggaaatggtatatgaggaaaaataaaagaaaaatgcttcacctttgtgcttactttcttctcccaaaaatccttcttttattgattaggagagggcatggctacatatttttttttcaatcatgctcatgcttgatggagcataactttatttttttttcataaccatgcatttccctccttttctttctttttttttcaaaaggattttactttttaggggaagacaacacatgaaagcatggagaatttattttggtggtaatatcggaatggaatggaatattgcttagctcccagtgtatgagttttagcatgtgcatatatgtgggtgtatgatcttgatcatagagcatgagaagtatctacacaagtcacaagagtttgacaaagttcaatggaatttcaagcaaccaaaatgtatatggtttaatcatgatagcatatttttggctctggtaggaacttatatcaaatgagaaactttcaatttatcattttgaaaaacaaagcatccggaatttaagtcaaactagtatcaggatcatagtaactctcattcactatctcatatctcgcaacaacctagacttagatcagcaggtgcagcccatttacctcaggttcgcggataattgttggctagttatatttaaccttttgagagagtatttactaagaacccatatatcagagatataaaatagagcaactattcatcatttcaacaaaaagaactagcttgtcttacctagcatgactcaaacctatcctatctttttggtattttctattttgcaaatttttatgttgtttttaagttttataagatgcaattggaaagcaaatatgcaattggaaagggaaaaatgcaatgggatacaagttacctcagtggggaggagagatatcccccccaagcttggtttcgctcagggtccttgataaggattgaacccctgaaaacggaagtacgcttgaaggtcatcgcgctgttgctgcatcatgttgttgatgttggtgaactgagcatcagcagattgttgccattcttgcgtttgagctatgtgttccattaggttgtactggatctcccccgtctgcatatcaagggtgtccattcttctagtgatttcacccaagtcccaacaagaggaacttgagcgccattcacttagatatggaggcacaccacttggtctgggaggttgattgtccccccattggatgtcatgaggcgcatgccaccggtcctcactggcgcttgtccaggttgagactcctatgctatggcgtggagcttgggtccatctaggtgcatccccagttggtgcccaacctgcctcatacatctgtacaggttttgaggatgatgaactttctcgtttgtttcttgtcatgttgcgcgtctccctgtatgttccagccgcacgagattcttctatggtctgcaggggaatggttagttcatggcagttgtacaaattataccccgcatttggcaacgggatttcatttgtacaaccggggaaaaagtatatcaaagatccatctgctccatatttcaaaatatgcccttgcactagataagcctcatcaatacgcggacgagtggttgagataaaagcaatttggttgctaacgacccctagcccttttgctatccgagtaatcagagaagtgcactcaacaggagcaaagaactttatactttctaactattgccttataatacatttcacatgagcaattttaatttttctaaccatggcaaacatgataattaattcatcccccctaatgggtctcagatcacctctaggaaacaaagtcatagcaatccatttgtgcatgagcctaagtgtaggattatggatataattcgttctaggtttcttgcaaattggagcaccagaaatgtcttgccaaaacctatttttctcgaacccagaaattcctttctggagatcgattttacaggaattgtgaaaaaccaagaagtgtacttaagcctttccatgtgagtgtgaactccttacggaaaaagcgaaaagagataccatcttctatttctttcaaagtgcacaaaaattgcaaagtaagcaaaccagatccaggctcgtctaccacaacaaatctctgccaaccaacagctttccaaataaaacgaaattcaacatccatacctatctttttcagcagctccggtgagtattctcgtgtgtgagcatactcctggtcgctcagcatgtagtaggcttgcctctcccgatcactgacaaggtcgaggtcagtgtcgtttaggagtcgtcgcggagcttcggcgtctttcatcgagacatcggctaatgaacgagtactagactcgtcatgatgacttgacgaagagccggaccctttgaacagacgagacaatcgcctcctcattctgcacaatgaagcaagaacggactaactcggcaggggttagaaatgacaagagtttcacccgccggttagtttcaccaaagcaacttgtatatatgcaactaaagatttgaatttgagggaaactatcaaagcttgaatgaacttgagagcaaactttggagagggaatgaaaatgtgttgaaatggggtgacgtcccctctcccggccggttggcttaaatagtgcacccacaacggtcaaaaccgacctgtggggcctactagccattgcctcaaagaaagaggcagccgaccgttggcctggccggttaggccgaaccagggtgttcggccgaacccctggtgggcccaaccggccccactttcggccgttggattccaacggtcagtgcggtcatggcacagtgaattttcgttgaaaattttattttggtttgctctgaaaaattcatttgaagaatttcctcaaaattcaaaatcctaaatgcaaattttgaatttcaaacatgcgatgatgcaaaaattcaaattgttgaaagaaaatatgcggatacataccaatttacctgttggcgaaggtcacgtcgtttaaagtctgacgtgcaagaccgtacctcctttcggttcagtttgcgtattttccacccgtctccaaaggtgatggagcgggcgcctttggcttttccttccacaccttctttggttttggtgcggaagacagcttcttctgagccggctggtctaacttcttggccggtacgggtgattttaccagcgtttttcaataacggttcctgggcatcgttgtttccttctccaggaagttctgcataaatttcaccaggctgtctattttgggtggctccacttcgaccacttgaatattctgagggttcggcccgtactttattctgaccatggagcattgttccgtccttggttggaactcaaacttttcctccttccgattgatatcgaaatggatattccccgttcccacatcaatgttggctcctgcggtgctaaggaacggacgtcccagaatgagcggcgtctccttccccgtgtccatgtctagcaccacaaaatcaaccgagatgaagaaatcctgtatcttgactggcacatcctcctctatccctgccgggtaacggactgatgagtcagctagttgaaggcacatcggtgttggtgacaacaccgtgaagttgagcttgtcgaagacgtcttttggcatgacgctgacgctggctccagggtcgcataaggcctagtcgaattgttgtgccccgatcgagcaggtgatcataggacaccccgaatctttcttcttttccgggagtttgtggagtatcaggttgctgcagtgttccgtcagcttgaccacctccgttgttgggagcggtctcttgttgttgagtatgtccttgagataacgggcgtatgtcgacacttacatagcatccaacaatgacatgttgatgtggatcttttggatcacttcaacaaaacgagcgaactgctcgtccgctgacggtttcctcatccgttggaggaatggcagtaaccgtgtgtcgcagtattcctgcggcacggtcttgtctggctgaatctccttgtcagccaagtcattagatggcgcttcttttgacatcccattagttcctgcagggttaggatatggcggatcacgagtggacttacctcccctcattgtgatcgccttgacattttcaatggaggagtcgggttgccccagaattctcccagtttcatttgcagggactaaagatgctaactgagctaactgggtttctatcattttgttaaagctcagctgattttgaaaagcagaagcgaagccgtctaatttgacattaatgttctctaggatcttatcattggcagcaagctttttgcttagcgcatcagtggttttggcttgcacaaaaatgagatcctttaaggagggctggttagagaagttaccgttattgttacctccttgataatatgggtgtggttggttccacccctgacctccttgtggatggtacccgttgttgtttcccatgtacatcgcctcctcacgggtttccgggcagtcattcccagaatgacccgtgccgccgcagacctcacacgtgacatgtgagtccaaggccttgacggtgccttgtggccttttctcgtggttgtccaagcatttcatgaggaggtccagcttggcagcaagtaactccgtctccttgacggtgtgcatgcctcgctgacaggtctggagtcgttcctcactccaacccatattggagaccatcttctctatgagttcaacggccccttgaaccgttttagagaagaaggctcctccagctgccgtgtccaggtgatcgcgggacattggggtgagtccattataaaagttctgcaggattagccagtcgtccatcccataatgaggacaggcggccacatactcctgcagacactcccatgcctcaggaatagacccatcccttgtctgctggaaacttaaaatccttccacgaagagcattggttttgcccatcgggaagaatttcgagaggaatgccgtatagcatttgtcccaggtgttgacagcagcatggttggcatagaaccactgcttcgctctcccgagaagggagaatagaaacagccgcagcctgatggtgtcgggactgacgcccttgatggtgtacgtgctacagatctccaggaactgttgcagatgagcattggcatcctcatttggcttgccacagaacgggctagcctgcgccatcgtgataaggctggacttcaagtcgaaatccacgtctcctatgttgacttgcggcccaatggccacattgtcagcagagggagcagcaaactcgcgaagagtcttgctggccatagtcttgaaggtcggtggcactggtatggctggtttctctgtcggaagagttttctgcggagcaacgactcgcggcctaacgctccgaaagaaagcttctggattttcattgaagtttttcggcaagttgaaaccagtcatgcaccaccctgttttcacaacaaaaagtgaaaacaaccaaggttagcttgcaaaggaaatgattatacagaggtaaatataaaataattagttcaagtaatctctactatgaatcttccccagcaacggcgccagaaatgcttgttgttatttcttaacgacattactagaaatataattcccagcaatggcgtagaaatacttctggtatattatggttacagagttcatccgcaagcgcacggatataccattgtagcatttcacccgacagtattccaagtgtatcgtatttattttatcccgtgggaagatcatgtagagagaactcaactaataatttatatattacttgtaataatcatatttgtcgacgggtcatacccgtagaccggatatagagggtattggggtacgttggtacaaggatttacgtaatacgacatcaaacagagagaaaacaaagattatactggttcaggccccttgataggtaatagccctaatccagttgatatgggattatatgatggaaatcacaggttacaaagggaacgatggaactcgatgaaaccggcgagatcgtaatcgagttggttcgactagatctcccggcgacttggctcttgtaggctctgacttcgtaggctgtgatggttgtgttggctctgagattcgatgccttaggtcctcccggggggtcccttttatatcgcaggtcaggcggttcccaagtaggacccggaaacaccggaccctgcacgatacattgacgacccagtcctgtccgagtaggactccttccatctgcaaactctgtgaaggatttccttaatgtatacagagaacgtccatatacgcgcaggcatgctatatcgatatatgacgtatatcgaagggtaaagggtatgccttacacgtaaccctaacagtagcccctgacttttgcttaaatgaactcgtgtaaccgatcgcgacttctggtgtcgaggctgttatcgttctcggtgcgaggaccgtaagacgtaatcgacagcaccatgtgaagcccaacggtcatgagtgaatttaaactgaagtccgagaaaccgccgcgcgtaacggacccagaaatttccggcgggcatctctctctccgttctttggaattcgcaccgtcggaaatgtgtctatttaagaggattttggggatccattttgaagtccgcctgtttgtgaagaaaaactctccagcctccaagcactcctcgtcttctccgctcgtgcacaaactctagcttgttcatcccggtcctttcttcggcgatctctgacggcgatggacctcgacaagtccacttcaaccagtgcgtccttgaagaagttggcaagaggagggcgccctccccagtcgcgggaccatggagagggaaccaggaggtactgaacctgaacctgtcctaggccgcatggttgcggtagaggattatattctttttggctttctccctccgccttctgagtttctcatcctcgttttgaacttctatggtctttctcttctccatctgaatcccaattccatcgccttcctcagtatcttttcacatctctgtgaggcctacattggggtagagccgtttctcgatctccttcgtttttactacgagttgcgctggatggaatccaccagggtatctggatgtgttggtttccgacttcgggatggcctgaagtcgcgctatatccccttccagtgcccttcttctcgtagcaagtggcgagcaagatggttctatcttcagatagaggattcggatccgatctttgttgttcctgaggagcagccagatatggtcttggaccgccaaacccaccttgaccccctctcttcagcccttcattgatgccatcgatgacctccgagtacggggcttgtcggggtatgaagtcactgctgacttcattggtaggcggatccagccgctccaggctcgagcccacccagcctttgactactctgggccggaggacgcgacccgggtttctcctcggggtatttttcttgtgtttaatttggtttccttatgtgcatgttcctcctgtcttaccgaattttggttctcggtctacaggtttgaaccgcgagactgtggaacgtcgcgtcggccagttgatgatcagtggcccgacaacagcgagcgacgtccctatccccctttgcgagaaggggaagctgagcgtgaagccgcaatcaacgtgagtgtgtttgtcgacccctttgtttttggtcctagatcgcataacgatttcacgtgatgcaggctctccctctgaccgacgtcattggaccacttgtggaccaccaggcggcggcttcgttgaaggagggtgtcgcctaggaggcgtccgacgcggccatcgctgctgttgctgccacgactagtggcagccgtgtcccgaggaaggggagaaaattcacctccgtgctcggcaaccgccgaaaagcgtcctccccatcagtatgtcactcgagttgttaactatgtagtcggaagacgtccccctcacgtcgtactggtcttacttaggccttggacgcgtctccgccacctccacgatggcagaagctggtgacgctgggcgagaagtgagtagacggaaattgaggtccttcatttggttgaattctggcgactagtcttgatgtccggatacgatgatcttttgtaggtcggcacgggcgaaggcggcgcacgacgggtccggagggaattcaagcgcgtctcctgtggtggcctcgaccgatgtcatggtcgtgcccaggagccgtgaggcgacgcctaccggccctgccagtgatctcgggcctgctcgcggcctgcctgctgacgtcctcacctgggggagctccaagtcgagatggggcgcatcctcgaggctggcgctcacggcataagccgcgagattgcggaagcgaggacgtcggcggcgtcatcggcaaacgagcgtgccgacaagctggcgcgtgacctggcggaggtttgtgaggacctccagaagatgagggaactggtggccggcaacgagcgacaacggcggggactcgaggaccgcatgtcggaacttgagaacaacccgtcgaggatccgcggctcgttgcgggtcacctacaccggcctacaccagctcgccagggaatgtggtgttacgaccaccatcccggtgaaccccgacgagttctcgctgacgacttcactcgcgaaattggccaaggcgatggaggcgataccctccaagcatgcagccaggatcggggaggaggcgtccaacgggatctataccgaggcgtgtcacgtccttgcgtgtgtgaggttagcacaccctgaactcgatttttagcggatcttggatcaggaggcgactaacgacgcgcgtaaaggcatgatggaggaagtcggcgatctgggagagtccgttctcccactttttgaagagtaggatctcagttcccttgtactctttaaccagtcatgccttgtaaaactgtgttggcctgtgtgcggtcgtcaccttagttttcttcagcattttgattccaagtactttgttgtcatttgtagagatgttgatgtcgaggatgtccagcagcgtgggcagcctgagtcgccagtgatcgtcctggcacttgcgtttgagccacatgtgtcgccggacgatgtaggtcagattttacccgtggaaacggggatggcgacgacatccttaggttggtggtcttttcatctcctttgctcctccgacttaatttgatgtgttctcgaaagaaaagagtagcttgacttagtcgtttctgtgctgagcagatctcgagagtgcgcttgctgaccaagatcgtcgtatccaatattggaagacgaaatttgatgtagcggaactcgagagaactatgctggaagtaaagaaggagcaggccgtggaaacactccgaggtcgtgaggtgtggttcaactcgtacttaaagagttgctgcacgtccatggccagagtttgtagagagctccgagtaccccgtggagatcctaaggagtcggcggctagatacatctcgtggctgaatggggcctgtactcagctcgaaggcgtcggcaaacgtattgacgaagccctgaagcaggagtgccatcgatcgagccgatatgccagagggcacgtgttggcttgcatacgagatcatcgtccgcaactgcacctcgagttcctccatgaagggttttctcgttctcggagaactctggcggagatagattacctggcgaagtcgatggcgccgctggctgagaaagtcttctagtctatggactggcgttggccttcctggtagtctttgtaccctgtaatagatatcttagggaaaagtgtaatatagttctggatttgtgcgaaattttaagaaatacttgtgaaatagaaaagaaatctatcttaactaagctttcttactctggatgtagtgtgtaagagtttcttctcactttacaactttggtcagtcgtttgagtcatacactctccctagcccccagccttgtcatcggagaattcttctcagaagataaggctcttcgacctttgacctgcctcgattgaacaagcactgatcctagcccccagccgtgaagttggaaagttaatttccgattacacggcttggttaatacgcacagcgagaactcttacacgaccagatcttacatggtctttcgtctctacaggatccgacaaggccttatcggctctgggcgtccccagccgaagatcccttaggttcctcggaggccttgtcaagacggcgtaaagggacatgaggataggtttcaacgctaggtgtcatctgggtaagagatcattgggcaggagcactttgattgtaatctgcacctgaaaataggctttattgaggctgtaaggtgtcttacaggtatggatactattgacatatacatagaatttacgtagttgatcaatgttccaagaatttgccaactcgcgaccatcaccgtctgcaattttgaatgcgcctggccgcaagacttgtgtgatcgtgtacggtccttcccatttgggtgagagcttgtttcgccctacttggctttgaacccgtcggaggacgtagtcaccgatcgaaagtatgcgtgctctgatacgcttctcgtggtaacggcggagggcctgttggtagctggctgctcggacggcaactcgttcacgatgttcctcgagtagattcacatcgtcgtttcgctgctcctcctgatcctcatcggaatacttctgtactcgtgtactttgatgtcgtagctcgctggggagcatggcctctgagccgtacatgagaaagaagggtgtttccttgttagacgttgtcagtgtggtacgtatggcccatagtattgatgggagctcttcgacccatttcttgtcatgtgacatgagcctgtcatacacgcgggtcttgattccttgtagtactatgccgtttgccctctcgacttgtccgttgctttgagggtgaggaaccgaggcgaagcagatcttgactcccagcccgatacagtaatcctggaagtcggcactgatgaactgggagccattgtcggttatgatgcggtgcggcagtccgtatctgcaaaatatccctttgatgaatttgatggcgttgtcggccttgatttcccccgtgggtgtcgcttcgatccacttagtgaatttgtcgatcgccacgaataggaacctgtagccgccctgtcctcatgggaatggcccgagtatatctagcccccagcacgagaacggccaagtaagagagatagtctggagcgcttgcacgggtagctttgtgtgtttactgtggaattgataggcttcacaccgctggaccatgtcgcatgcatctttgagggcggtttgccagaaaaacccttgttgaaaagctttcccgaccaatgtccgatcggcggcgtgtgacccacagatcccttcatatatgtcaaggaggaggtgtctgccgtcgtcggatgagacgcatttgagaagtaccccgtttggcgctttcttgtatagatcattgccgatcgtacagtagatttttgctttacgggttattttctcggctactgcgtcgtcctcgggcaactcttcattgttgatgaatttaatcagtggggtgcgccaatcgtctgtggtctcgatatcggcaacggagcgttctacctctgtagcctccgagctgatgtcggggacgactgggttaccttcgctgctaacctctttttctaatggctttgtcaggacgtccagaaaagtgccgggctcgagtggttctcgtctggacgcacgccgtgctagatcatccggctcgatgttgtccttgcggtatacgtgtcggacctcgatcccatcgaaccttttctccagcttcctgacttctgcgagatagttagataactcggggttagagtatttataatctttgtgcacctggttcgcgactagttcggagtcccctttcacgatcagccgcttgattccaagtgcgactgcagctcttatcccggcgagtagtccttcgtactcggctgtgttattggttgccctgaagttgaggtggattgcatgcttgaaggtgatgtcaagatgaatcctgcccctgcttcttggctgttgagtgcgccattgaacgccattgtccacgtttcgttgtcgatttggttgtctgatttgttatcaggcatagtccaatcggctacgaagtcggcgagtacctgggacttgatggctgttcgtggcacaaagtggacatcaaactggcttagctcgactacccatttcgcaatgcggccgacaacgtctttgtttctcacgacttcaccacgagggaaggaggagacaactgtgactctgtgggcttgaaagtagtggcgtagctttctcgatgtcatgattaccgcgtagagcagcttttggatctgtggatatcttgtctttgcgtcgtggagagcttcgctgacgtagtagactggtcgttgtactttttctctctcgacaacaatgacggtgataacgaaatatggcgtggcggcaatatagaggaataattcgtcattaggttggggagcaacaagtacagggggatttgataggtagcgcttgagtgcaatgaatgcctcttcggcttgctgtgtccattcaaatttgtcttgcttcttcagtagagcgaagaaaggttgtcctcgctctcccatcctagcgacgaacctgcttagtaccgccatgcatccggttagcttttgtacttccttgagtcttgtgggcgacttcatgttctcgattgccttgatcttctcgggatttgcttctattcctctgccagagacgaggaaactgagcagcttgcccgacggtactccgaacgtacacttctctcgattgagcatgaggcgatatcgtcggaggttgtcgaacgtttcccgcagatcgtcaatcaatgagtcgcttgtcttcatcttgacaacaatgtcgtcgacgtaggctttgacattgtttccaagctggtcgctaagtgcgccctagaccgtgtgctggaaagtattccctgcggttatcagtccgaacggcatcttaacgtagcagaataccccgaacggcgtgatgaatgttgtcttctcctcgtcctcttttgccatgctgatttggtggtagccggagtaagcgtcgagaaagctcaatagctcacaaccggctgttgagtcgaccagttggtctattcgaggaagagggaagtgatccttgggaaacgccttgttgaggtcggtgaaattgacgcacattctccatttcccgttggccttccgcaccataactggattggctagccactctggatggagtacctctctgatgaagcccgctttgagaagcttgtcgagctcttctcgtatggcttgttttcgatctggtgcaaatctccgcagtttttgctttactgacttggcgtcgggtcgcaccatgagtttatgctcaatcacctccctggggacccccggcatgtcggacggctgccaagcgaacacgtcagcattgttgcggaggaaggtgatgagcgcgagttcttatttctcgcctagtgatgccccaatcttgacggtcttgtcggtgttggcactagagagtggaacgatcttgatcgcgccgtccagtttcggcgtcttgtttgttttgctcactttcttgggtggctcagctgtggcgggtgggctgggcgtgtgctcgaccatgtcgaggctccgcttgtcgcattgcactgccagcttagcgtttccttgaatagtgattgttctcttcggtcctggcatcttgagcacttgatacgcgtagtgagatgcggccatgaacttcgcgagtgcagttctcccgatgatggcattgtatgctgtatcgaattcagcgacatcaaaggtgatctgctccgttcggaagttgtttgcttggccgaaagtcataggcaatgtaattttgcccaatggtttggacgaggattggggagtgattccacggaagggttgatcggtgggtgtcaactcgcttcgtgggattcccattgcatccaaggtgctggcgaagataaggttgattgagctgccgccgtcgatgagaactcgcgcgaccttgatattctgaatggtaggttcgaccacgatcggatagcatcctgggatgacggcagtcttggggtggtcttcttctgagaattctatcttctgttcagacaacttcatcttgggtacagtcccctgccacgtcgaacagacttcacgttccacttttcttgtattctcgcttcgaggagtacgctgtggagcctccgaagatgtgcgagacgtggagattggagtctgggtatgctgagtctaattcctgagtagctgcctccgcatccttctcgactacgcgtactcgcttgcctttttctaatgccatgtgcttctcgagcgactttttgaaaacaaggcaatcttccaaagaatgtctgtccaacttgtgtatagggcaccatgctttcttcgcgtcgctaccttgtgggcctaggcgcttgggagggttcgcgtattctgctgcgagagcttctgcttgagctttccttttcccattcttgcgatttttcttcttgcttgactcaggtgcgtccttggccggtttcttctctctcccggtcttcggcttatcgttcttgcgtctcagtgcatcgtccgtgtgggcgcatcgatcgacaatctcgaataatctccgattagtcgtgatgtgtcttgttgccaactcctgggtagtatagcaatctctgacaccggacttgaaagcgcggattacagaagcgtcggtgatttcggggattgtatttctgcactcattaaagcgccgaacatattccctcaaggattcacccgggttctgtgtcaacgcttgtaggtcatcttcgatcgcgtggcgcttgtaagttacttggaagttggcgacgaactgctgccacaggtctgcccacgaagaaatcgagtagggtgggagatgcatcagccatgaacacgcagagcctttcaatgaagttggcaaataattcgccaacgcgttgtcgtctgctccggcagcgtagagtactgtggagtaaacttgaaggaattcttctgggtcggtactcccatcgtacttctctattgctcctggtcggaatctctcaggccatcggacatcacgcagtgaacaactgaaagctctacacccagcgctgggggcggtgggttgtcggcgatcgtatgttcttcgtggatgtctgtctgatgatgaggatgaggaagaacatgacgatgacgatgggtcacttggttccggtgtgtgattacgaggacgtcggccgggttctcgagaatcctgtcgtcgccctctgttgttgtcccggcgccgatctccatcgtcgtcgtcattatggcggtgtcctcgaccagtatcgcccgtcacccgccgttcacgatcgtcgtgatcatggcggttgtggcgattatcacggtctcggtcttcgttcgagcgacctcttcgctcttcattatcgtgatgtcgtgaagagacgcgatgtcgggaatggttcccgttgtctcgtgtacgtcatgcctctcggcggccattcaggtgatcacagagatcgccggtgccgcgaggtggaggggtagctcgatgaggcgattcctgctgttcagggttttcgccattcacaccgccagtgggtggctgttccgggagtgctgcagcagcggcctcttcgaacgcgttgctgaggttggtcaccgattcccgtagtcgttctgtccactgtgcgagatcatcgttcagaacgggatcgtagggggtctccctcagtattgcgttgatggtcctgatgtgctgagccggtgtagtcacttgattttccgcttccgcattagcgcgtgctgacatgctggtcccgtcgatagccaatacctcgcgtggagtactcgttggcgacgagccatagtcctcgagtagatgcagaactgatggttcgtggggatcgacatcgattaccccaacgaatcgatctgagaccagcgtcgctccctattccttgtcttcatccctaagggatatgcctgactgctggaccttaggagatgacgtcttcatggcgctgagaaagaccttgcagcttgagaggtcgtgattctttgtcttgtgaataggacaatagacatcacgagttggaaaaacacgctgaattccacgctctttgtaggcgcgaatttcagcgtggacgttgagaaagacccagcaggcttgcaaagtgtgtttcctagtttggtggataggacaccaggactttgtcgcttcggaagttatccttgtcggctcgtggttcttgtcggaacgacaaggtttggccgcattacaatccttctcgagctcggatgtcgtcgacgttccgttctccgcttcggcgggaggatcattcgacatggagtcgtcctgggttgtagctactgcgttctcgtttccggtcattgatggaccggctgagaccggcaccgtggtgcaaaccgggaagacgatttcgccgacttgagtccacaccagcattgttgaagcaagaactccctggttgaggttggtgttgacgttgttgtcgatgaagctggatgacatagtagtagaaccttgagcaccaagtccccctacctggcacgcctctgtcgacgggtaatacccgtagaccggatataaagggtattggagtacgttggtacaaggatctacgtaatacgacatcaaacagacagaaaacgaatattatactggttcaggccccttgataggtaatagccctaatccagttgatatgggattatatgatggaaatcacaggttacaaagggaacgatggaactcgatgaaatcggcgagatcgtaatcgagttggttcgactagatctcccggcgacttggctcttgtaggctccgacttcgtaggctgtgatggttgtgttggctctgagattcgatgccttaggtcctcccgaggggtcccttttatatcgcaggtcaggcggttcccaagtaggacccggaaacatcggaccctgcacgatacatttacgacccagtcctgtccgagtaggactcctttcatctgcaaactccgtgaaggatttccttaatgtatacaaagaacgtccatatacacgcaggcatgccatatcgatatatgacgtatatcgaagggtaaagggtatgccttaccagtaaccctgacaatattctaagcagggattaagataatccaagggtagactgacacacaagcattaacaactcattctcgtaataaatgatctaagctaagtggaaagaaaagagaaagaaaatcttttcctatacttttaatatacatagtatacatacattctagttaactgatatactagctaataccctctatccgatgccctcctggtacttcgagaagcaacccctgactgccgagttccttacgacagcccgtcatgaccatacaaccggggctaaatacggaggaataccatccccaggaaattaacttaggattatataccggcgaggaggaatacccgtactgagctgtcaccatcagcggcccacctctcatccgcaatatataacgccaaataatgatatcccgtaatctagacaccacgtctaaactaccagatactactctaatatcatcgtcatgacatagagtaattgcataagcaaacattatacccgcaccaaagcatctcccagataagctagccgtatattcagtataacatgaacataatataaagtaggtactcatatactcggaaagtatttcaataccataaatgtatatagaagagtattctaataaaagtacaaatcttacaaaagaggaaaggaaagctgctaaagccatacatgaactcttccgaagtcttccggactcctgatttctactctattcctattccaccagctagatactactaaactaaacttgagagaaatgagagagctattgcttgaggtgtgtgttgaagtgaagagagtgaactccttaaataggcaggtaatgacggttatggcggttggaaaggtcggtaataccctccaaccgccataggggagcaatccacactattcatccaaaccctgcatccagcggtttcacggcaggttcggacgaaccaggggccggcccaaccagcccacattttggctggtggcctccttcgctgcttcactttgtagacttgtgaattttggcccaattcatcgtgtcaattttaagttcttggcccattcatacataagtctggttatcggcatcatccgattgatttatcgtctgagttgatgtcgattctcctccactttattgtcattctctgcaaaaaggttagtatacctaatactagttgaatactattattctaacaaatatatgcattgcaagcatcactagttctcctctattttggtaatattgacggtcgaaactgatcgataacgaccgtcaacacaggcccatccttcatggtcacgggggcaccgccgtcctccccatcccctcctcctcgcctccgattctggccaccgttggtcatagcggcggcaatggcccgtctaggccgagcggcgacgcggcggcagcaccaccaccggcggcgcctctgccgccctcagccgccgccgcctccgcgccgaggccaccgccatcagccgttgctcccgcctaccgctgattgtgagagagagaggaagagtgaggagagtgagagagagaagagagataggaagagtgagagagagagtatgacaggtgggccccacatttttttaaatatagaatgctgactgtactgccacgcgtacgccacgtagaccaaaaccaccgcggattggctcgaggggggtaattcatccggtttgtatagttgggggtgaagaatgtccagttttgtggttcagggggtgattcggacaaccgcgatagttcggggggtaattcgtactttttcatatatatatatatatatatatatatatatagctgaacactactcttgtgctttattggacttgcttagaatgagcacaaaattaattaactaggacagaattcggcgataataaaataatacggcatcttctgcaggaggattggatactatttataattatagtgtgctagtcctagcttacaaatctaataatggaaatatttttagattcataatattagcatgtgtcttatctcatattaaattgttacatttgtattcacaaattaaagctatacccactttaatcgacctcctgactactgcctataaagaagaaagaagtaataggttgggatatgatttgaacccttgacattttctacccaaaacaaacgcgctgccaagctgtgctgcttcccattttcaaattgttgtacaatgttattgtacacaattcctatcatgttttccacatgctaattttcttctctttttctatctatagagaatcctcttgtcattttttgggtctcatataatcaaggagtggtatatatctaaatccaatctaatttcacctataaaagaaatattactattcctgggtagtatatacgaagggattgtctttttggtatttagttcagaattttgcctaaacaaaagaaatacagacaaccttgggcaataatatctgatcatatacgtattccaataaggaaggaggattttcaatgcgggatatcaaaacatctctctatgtagcacccgtgctaaatactatatatggtttggggctttagcagatttattgatagaaattaatcatttatttacatatgctttgtcattctctttttttttattctaagcgttgttgctatgtgagaaatagagttcttcatgacatgataaaagtttcccacatttaaatcatttttttagtatagaaaagacaaagagagaaaagatagattgggttggaccttacggtcatgaaaattttggtaaatctcatttttgaaaaaagaaatccaattataagcagtatgcaagctaaatcaggtctaagaaatcatagcatagaaagagcggggattggatttcgaagcaaaatctttgctaatttgacgaggattgtatttcttaattatttctctattttactacttaattaaaaaaatttcaaaaataattctaatggattttcttcttcctcttcggtttcaaaatagaggattaataaaagaaccaaatagaagaacaaaataataagtagaagagttaagtaaagtcaaacaaaaagaaaggaggctcatggctaaggggaaacatgttagaatcatagttattttgcagtatgtaagttgtgttctaaaagacgccaatgaggagtcggtagggatttcgagatataagtaatcaaaagaatcgtcacagtagacacggacaattagaattaagaaaatttcgttgttattgtagtaataagcatacgattccatgtgtacaagtacggaagattcaattggtgggtgcctagtcatagtgatgatgccacatctcgtgtatcacgcgatcgatggaaacagctaatttaaccacaagttggctgtttctgcggttaattcttgcaagacagacgaggagtgacacccattcattgggaccgtacgtctaatagttcgtatcccgactcatcaaccataatcatatatcagcttgcattgcttcaccacttgtttctatctagttataagttttatatcctagtactccctccgtttcaaaatgattccctccgtttcaaaatgattgacaccgttgattttttaagtacgtgtttgaccattcgtttattaaaaaaaataagtacttatttattcttttcatatcatttgattcattgttaaatatactttcatgtacacatataattttacatatttcacaattttttttaataagacgaatggtcaaacatgtactaaaatgttaacggtgtcaaatattttgaaacggagggagtagtagatgacccactaactattagtcacccagatagtgtgtgtgtatatatatatatatatatatatatatatatatatatatatatatatatatatatatatatctcgaagactaccagaaacagaaatttctaagtcgtcctcaccagacatatggcctatgatcttggcctggacatatgtgtgggttgttgtgtcgccactatgacaagtttggccgatgccttgtgtcgagctccatcgtgattgtttaggtcaggttagttggtgtggtgttgtagttatggttttcgttcagttttctctaattaactggatactgtaagtatccaaggtttggtctatttgcttcttaaaatgggacacctttttaatataaaacgtcggcaacggcataaccgttaaaaaaaatatcttggcctcgacatatggctctgctagctgctgatgttaattactcctaggatacagcacgcataaaaaacccaactattgctgtaaatatgcaatcgctaattagcttgcttgcaaatcgtcaatcacctgaattattagtcttattaggttagtgcatattattagtgcttgctacttaagaatattattactcataaacaagatagacaatttaccgctccattttgcaaagatctatttttagttctttttaatattacagactttagttgttcttgtgagtcttgaagagaaaatggcattacatttagcatctattattattattattattattattattattattattattattattattattattattattattattattattattattgctgctgctgctgctgctctgctactactgctgctacaagttggccctaacacatctagtatgtcctacaaattttagcacaatcaatatatactgtaaaatcaaagtgagtttattggttttgatatttggagattattggcgaagtggttttggagatgatcggattttcaagtgatgaacagggactgctgttttgtcgggtccggttagagcgggcaggtgctgccgatcagaccggccaggtcgcggtctgaccggccgactctgtgtcagtttcggtttcgggttgttttgttggatatccgtggatgtttcatgtttatggcttctagatggataccatgcgtatgtaatactgttgttgctaacaatgagtcaagttagagatagcttggtctcgaaatatggtttcattgtttcattcatgtgtaggtgtctttatgccttgggagagtattgctggtgatggatcgagagtcaacttgaatataaggtgacgtccggacagtcagatatcatgcggaatacttaggctaaagatcaatgcacatggttggtgaagattccatatggcatacgatgaagatattgtgtgtgtatgggatgcggagtcgaatttggaaggaatccaaatttggtatgattggagtttgtaaaattggtttcttgtatgagaaggtttcctaggtggattaggacttcttttatgagtttggttcgtggctttaggctgcctacctcatgtataaatagagagggaggatgaggcttcccggtatcgcttttgagagcattgagttgagagttgagttagggtttcaagtttagtcgagattttcatgaggagtgctgttgttgcactttgtaaatacagatagaagtaataaagttatcatctacatcaagagttcttcgatttgtgtttgctcgggttcggtggtctaaccggtgaaacaccaccggtcggaccggctgcattgcggcagtcagactgccggagtagcggcggtcaaaccggcggtggctttaggcgatgacagttgatctctgcggtcagaccggagaatcaatctcggtcagaccgactgtttccaggtggttagaccgcacatctacattggtcagaccgcgattcatcaaaatagagggtaacttttgattccgctaaaagttttggtttttgggtacaccaaccattcacctcctctctggttggtttagttcttgctattcggtgctacatatactgatttgaaaagaaaattgctctaatatatactgtactaaattgcaatcaaaggcacgaaaatcatgtttattttttacgcagtagtgctagctatttctattattattatgcagtagtgccacctagtatgttagacttggcccttgtatcaaaatcctggctttcccgctgcttccatcgcatcaaaacctatgtgataccaaatattagttatcgagctctctatgatccaatcccagagacttgttattgagcttccccaccatacctttgcatctcagaatctatgtgatcccaaacacttgttatcggtcttccacatcatgcgacctaatcctagagacttgcatgtcactgggctcccccactatgccattgcatttagaacctatgtgattccaaagattcgttactctactccctcactgtgtgatatatgaaaatcattccgcgtctttaaaactagtctttgatgccacttattagagtgcaaaacctgctcccatcaatctgtgcacccaaattatattgggtatgctagctccatcacaaactcaaccggagtcataactttagattttgtcctacataacccaaaagatagatttaataggtgaacactgttggaaatttggtcataatttggcataatttgatccaaaataacaagataataaacatgatatttacaatgggatttgatccagtgatagtggtgaatgtaataaatatgagcatgcttaacgtagaataagcatcaacaatcacataataacgcaatgttgacattgtgatgaatattaacaataaaacttctaattgaaataatataagaaggttataccccaagaatagtcctccgctggagtttgaggcagtattgcctctaaggtgttgacgggaacctccttctccttgggaacctccttctccttgaatccagtgttgtcgttgtctccagtgttcgacatgttggtgaagataaagtagacgttgacgaacagtgagtagtcgcgccttgcgctccccaaaaacctgatcgcccgcccgtccgtgcaaacgtcgcaacggtgcatggtttcggaggcctactctcccaacgcgtgtgcacacactcatcgggatgggattaccgtagcagcaacagccttggaaatggatgaaagtgtctcacttcttctttgggagatcaaatccattcttattttataggaggaatggaagatgaagagtaagagtcatggaataggaagaggaatagagtaactagttctcatcaattagccatcaaccatcctccactacacaaccattaaccaaccatcaattaggagtaattgatgtaggttaccaatggaataggaagaggaatatagcaactaattgtcatcaactagccatgaaccatcctccactacacaaccattaatcatccatcaattaggagtaattgatataagttaccaattccctaatcaaatggattaattctcaaaactcttcatcccattgatatcccataagagaatgaatacacatgaattcctagcataatgggtcttggaatttatttgatttaattgatttaaatggatcaattacccaattaaatctaacaacccctatttttaagtcatgctccccaccatcagttttctatgtgaaattaactaaacttaacacatattttctttgttctaaaataagcaaacctaatacgtggtgatattatcctattactatgaatttgaacagggctatccagattcgtagtactaaaatatattatagtttatattagatttgtttattttgaaatggagggagtatttacttacaattgatcacacattgattttaacaccattcagtagtcttgcctcacactaaaggaaatgaccttggtgcccctttttttatctttgaaattctttttttcctagtagttacatatggatcagaaatagcattggcatgtactacctccctttttaattatatgaaaccattgacttttaatataaatttgatcatttatcttgttaaaaaaattatataaatactaccatttattttgttgtgacttgtcttatcatcaaagaaactataattttaacttatacttttacttatttataataaattttggaataacatgaacatcggagccaccaccgacaccatgcatcaactcaattagcttgtccgccgccaattcgtagtagggatttaattagtgttatggcagtgattgaaaataatttttttatagcaaatacatatataatatagttatatttgtccagctctaaaagttttccaggtccaccattaatataaatatagaggttgtatcagatccacaaccaatcatatacaccatgttctagcccgaatacaaagccaagatcttggtggtacaatatgtaggcccactaatatgaacatcacttttgcacgggtttggtgtggcatctaattaaaccgatgtgcaaggattcctttcagacaccacataattgtgttgtccaaaaagacctttagccatctctattcattgataatgcactttgaggattatattccgactgcttaatctttattccgacaccttaatctttcttcgaatgaggcaaagacaaaaaagataaatagtcccataatattgtgccagcggaaaatgccaactaattacttcatgttaacagaagtcatcaaaatacaacagacaaattggaaaaatagtacatagcgcacaataattttccatttcttaattatgatagagtcggaattttctaagtggccacacaaatcctatctacagacctgtttggcacaactccagctctagctccacctctcctaatgctagagctcagccaaatagtttcagtttcacctaaaatgggagcgaagctgggtggaccactcttacaaaataaactagagaggtggagctgggtttaggctgctccccaattccactctagacccaactcttagagctaaatttagaagttgaagctcttccaaacaggctgtacggaattaattgtacaaattaaactttgatgcgaaggccatattaaattccatgatgtaataaattaatcaaatgtagccaaactttaggattggcccactcacatctcttgatggtacaaacatatctccccactcacctttagcaaatccttaagggtggccaactttaggaagagagacaagatttgagagtctatacatcgcacacgtaatgaagatcaaaagatatatgccctaagctatagctagctatcgacaggaatacagcttttgatatcgagaacccataatatttgccactttgttctcctggcctttggagaagacatatcccttcagctccatcaaactgtgcctttcctttgggccccctttgggaatcataatcttctgatgattgtatattttttttgaaaagaatgatgattgtatatgcaacacactccctctcttgatctggtccctcaaagtgaaagacttagttaggagttagattttctcattatttatgtacgtgggattgtaggctaccatacgtacgttatttgtgtttggcaatatttgccacgtgcgactatatatgatatgtaatctttaaaaaatctggaaaagaaatacagatgtcaaacgtattttacgcatgaagtaaaagtttgtgaaaaaaatgatgatatctatactacttcaaaaactcgagtgctaccacaaccactattgacatgtggagccatgacatgaccatgagttacataaggtcagtgtactaatctacctgagtatgctcctccatctgtttcaagtttgaatagaaaaaggagattgagagaaggccggtcagctctataattttctattaatttgcgtttttttcacctcaattcaaataaatattagttttttcttttgtcaaatagggtttcgatctatattcaagtgtctcacgctgagaactacaatcctaaatacggccttcctctttttggtgtttttatcatgaaaaatcttatttaaaccaggtagaaatattttttttcaaccatgaaagtaaattaaagactaaacattctcacattaatcggaaaagctaaaaattctcatgttaaaccaaaaaaatatatgaaatcatgtgtatctataaaatctgcagctattgaactatgatctttctgtagattacgtgatttactaacaagagtgctatgccgagagataaaattccccaacactttcaccaaaaaaaatatatggatttgttatattagaaattaataaatacctatttttgtccgttcggtgtcttaatcatagtatttttataatttaataattccaacatttgcaattcatagatagttgtacaattccaacagttgcaattaataatagatatagagttctaatcagtttttaaactaaagtatattttttatgatttcataattttaaattctaagttaacaaatatcaagttatatgcgatatctagagtcttaattttagtttttcttacacggtttattatttttaaattagtagacaccaagcgtgtgtttggttctgggactaggtgggatgggatgaaaccatccctgatttgaggattgggatgattccattcggatgtttggtttgtagaataggacgatcccagttttttgtttggttcaaggaacgagggagggatgggatgagcgccatttgcaaccaccgacaacgccgtttgcaacaaccatgaccgacgccgcctctgccctcacctccggacgtggtcgccaccggcctccttgatggcgtcgatgagcggctgcggggggctcgccgacggcggcggtagacggctcgggcgacagcgacggcggcgggctcgggcgacgtcggcggcggtgggctcggcgacgacgacggacgggatgacccaaccgagcgctggcggcgatggtgtcggccttcgcgcagagcagccgcggctcggcgatgacaacggcagcgaggtccgcgcgggagagggagagggagaggccggtggagaggagggcgagcacgaccaccatcgcggtcgggcgggcggagaagcgcgacgacgcacggtcggccttcgcgcagagcagccgcggctcagcgacgacgacagcggcgaggtccgcgcgggagagggagagggagaggccggtggagaggagggcgagcacggccaccatcgtggtcgggcgggcggagaagctcgacgacacacggtcggcccgccgccgagttccccgtctccggatccgtcgccacaaccttccccatcgccggatccgccgccgccgccctccacaccgccggatccgccgccgccgccctccccaccaatggatccgccaccaccgagccccccgccgccactgtcgtcgagcccgccgccgccgccgtcgtcgagcccaccgccgccaccgtcgcccaagccatctaccgccgccgtcgccgagccccccaccgccgccgttgccgagcccaccgccgccgtcgccgagcccgccgccgtctcccgaggaagagcgcacgagcaaagcggcggtttcacgccgtcgctcgtcccaggtgggacgagttcgtccgccagttttggccggaccgattggtcccggatctgagaggaatattcctctatagggaccaacccatcccactcacccctgaaccaaacacccctaaaaatgggttcatcccatcccatcccatcccatcccatcccagcaaccaaacactacccaagtcattcagcctcagtatagttttcctttcattatttaacaatttaaaattttaaaattaacaaataccaagtcatacccgaccagattctcaattataataaatttatttggaatattaactagtaatcatgtagtaatattgagttgtgctttgtcagatgcctctttgatttaatatttcaaaattaatatacttcatattgtccttaattagtttagaatatcatttatattatcttcatggtttaataattctaatatcttagtaaatatcaagctgataatgagcaactgcatggtggaaccaggagtggcctagttagggctagagccttattctgagcctaaatacccattgaaacaacacttcaaattttaaattttagaagataaacggcaaacctatgaaaattacactaatatagccgtaggcttgagaaaatgctggctcttccacgggtaaacaattagtccgggccttatgacagattcacacttcatagttaatactggtgttcatgagagttagaccatgtttattagatgtgactaaaaacttttaagtgcctatcacatcggatatttagacactaattataaatattaaacatagactattaataaaattcatccataatcttggactaattcgcaagacgaatctattgagcttaattaatccatgattagactatgtgatgctatagtaaacattatctaattatggattaattagacttaaaaaatttgtctcgcgaattagctttcatttatgtaattagtttgtaattagtatatatttaatactctaaattagtgtctaaatacagagactaaagttaagtccctagatctaaacaccatcttatagtaagagttgtatcatttattggctctgggcccctcagacatgcagatagaaaaacccatgaaatatggagaggagctttttggtagcatcacatgaaactaagaaagcaaagtacactactagaaaaaaaacacatagaaatcgatactataggtactgaatgtgctaaaaccaacactatagacattttcccaccacctcgggctgaaaacacaaaaaaccaacatctttaatcaactataggtaccaattctaaagaaaaaccaacacctctactatagatggttccttatattataggtgtcggtttttttaaaaagaaaaacatgtaccctaaaatcgaaccgagccgaaccgatggcctccccctcatcctcatcctttctcttccttccttatcctctcctccaccgcactctctctccccccccctcgggcggcggtggcctcccctccgccagatctagcgggagggtaggcgacaacagcggcgtgcggtggcaggagggaagcagcggggggtgccctcccattcgtcagatccggcgggaggagaggtgacagcagcatcatgcggcggtgggaggggaggcagcatcggcgagtggtgtcctcccctttgccagatctggcgggaggggaagcgatagcagtggcgtgtgacgatgggagggaagcgacagcagggacggcggcgtcccctccgccagatctgacgggaggggaggcgactgcaatggcatgcggcggcggcgacgccctccccgatgtcgcacattcttagttgtcttagtgttcttagtattcttggtttggttgggatgttcttggatgtttttggattggttggggtgaaagggagttgctcgatacatctgctcgagccagctttttttttattatttgtggaatctcaaatgtgttggttataaagcgacaccagaacaggcacctatttactctccacgtcagtgtcgccttccaggtgccggttgggaaatccggcacctttgtgggttctcaactggcaccaattaaggtttctatagtagtgataatgtctccttttgaattgaaggaaaaaaataagagtttatatgattctaatcttataggatttttttatatatacccttttaagacaaaggattagagattccttaatcctatagaatacactgttttgcacttgcatatcaaaatctagtgtttaatctatttttccattttctcaatccagtgtttaaaaggagcctttaaaattttcaagcggttagacctcgtacttatttattttataaaattgatccatagaaatgcatacaatcctatgaaaagtttcttatatccttttccaaagggttgtatagaaaaattttcttaaaaaattgaatccttcaagcctaattaaaaagcaagaaaagcaagggcaaaagcagagaaacaccttgggatctttcggctagcttcataaggtgatgggctagatgatctgggttcgaagtctgaacccttctaattatttgatattagttccttctctaatattcgtgtatttttttttcaagggtaaaagcagaagtgatcaagcagtgagaccgatcgaccaagacgctgtttaatttgacccaccgatcgacgggctgcctcctcagccgctcatcagatgccgttcatacagacggcacgcatgctcggtgtcgtgtcggcagagatccctccccaccgccgcgcgcaatggttgccgcaccacgtacatattcgatcgcgaaaatcacgtctattaaatatatgttggtaatatatttgttttatattaaaaatactattatgaacttaatcgaatttatagaagttcggttagaaaaaaaaagttaaaacactttataatatgtaacgggcaggcagcgcgcggctgccatcaaccattccatttcatccggccctctcccctctcttttttgctctctgctttctctggtgccttctatctatccagcatgatagcgatggcaacatgttcctcatgttatgaagatgcatctgattatgatatttgcattgcctgtgtatcttctccacttattttggttagcacgatgatgtgaatggaattcgatctcaggaattgtgaatggcatgaaaatggagtgaatcgggttaaaacccgtacaaaacggattaaaatccacacaagcgttgtcacacgtataggctaagatgcctacccgggaaataggtaaggccgttcgattctatgaaactaaaaatatgaatgactgcgtaggaaggtaatgtacgggaggattggggaggaatcgttgtcatcctcaaagtcattatttgcggtgacagcgatgaatggagagctcaaagcgggacttgtgacatgttacggatgagccaatcagtcgatgtgactgtggttgatgccactatctcccgaaggctaataatcaaggtgtgtttagttcacgctaaaattataagtttgattaaaattggaaagatgtgacaaaaaagttagaagtttgtgtgtgtagaaaaattttgatgtgatgaaaaagttgaaagtttgaagaaaaattttgaaactaaactcagcctcagtgccggctctaaaccctccttaagcaccatgagagcggtaccgatgaaggggctataagtgttggttgtaaaagccatccttagcatgttaggattagatggttgtcacatctgtaacttacaaattacttatacattaaaaccaattaattactgatatattatatattatcctaatcggttcataattatatatccatccctttcctttttatttacacccaccccattctgctgtcgtatctgtccgaataaaaaagaactttatttctaccgaatccgattcgacatggatcagatgggaaaatcatccgtacaattcactcatactagtacaacgcaggcgcaaggatgcatggcaatctcctctcttctctacgtgagctttttctcctgtgtttttcttttccatgagctttttattctaccttttgcaacacaatggagatgaaagaatggtgcgtcaatcgatcgaccagtgcctccgctttatgctgttgtgtctaatcaatctttatttcagtaaatactataaaaccgtaacactttgttttataaaaaatatacagtacaaacgtagacgttgcacacactcatccttataaatgtacgacacacacgcacacgctatatctttgagattgatcaagtcatcatgaacaccttgctgtcgacagatgtgtcgcctaatattaatagaaaattagtcgtaaatatgagaatcataacatctttatcgtcaaagctgtaaaaaatagctttatagtaaatatttgtacaactgagtacttacgtttgtggaattgcttaaactcttttgcatactcccaccgttttaaaatatagatgccttatcccaagtcaacttttgaaaattttatctaataaatgaactaaaatgtcatgcatgtagtatcatcattaaagtagtactgcatctattttcagattacttcttgtgttttaggtttgttctaagttaaatatattaatcttttttttgaggaaaatatattaatctttaatcattaatttctataaattcatatagtttgacattataagatatatatttttatattcactatgagaaatactttcatgatatatgtcgacgggtgatacccgtagaccggatgaatagggtattggggtacgttggaacagggatctgcgcaatacgacaccaagcaagcaaagagacaaggattatactggtttaggtctcttatcaggtaatagccatagtccaatttatttgggattgatatggaaaaaccatagagtacagcaggagtagacgaattcgacgataccgacgagatcgtagtcgatggattcgacgagatctcccggtgagttggcttcacgtgctccggctttgtagactatggtggatatgttggtggtgagattcgatgtcctgaacccctctcagggtgtcccttttatagcgtgggtcaccttggccctcaagtaagactccgagacatcagacctcgtacgatatagaagaaaccctatcccttccgagtaggattttattaatatctcgactcgtagggatattttccataatgtcagggttacggattaggtataccctctatccttggatatacgttgtatactgatacggtatacccgtgcgtatatggatagttcctgtatacgttaaggaaatttatcacgtgataggaacagaatccacgtatgggaggagtcctactcggacaagattgggtctttaccgtatcatgaggggtccgatatctccgagtcctacttggagatcaactgacccgcggtataaaagggaccccctggataggacctaaggcatcgaatcgcaccgccaacacatccaccacagcctacgaagccggagcctacaggagccaagtcgccgggtgatctagtcaaaccaactcgactacggtctcgttggtatcatcgagttctgttattccctttgtaatctgtggttttcatcatataatcccataccaactggactagggctattacctaccaaggggcctgaaccagtataatccttgtcttctgtttgctttatgtcgtactacgtagatcctcgtaccagcgtaccccaataccctctatatccggtctacggttatcccctgtcgacacataatacgtgataaatccttttaacgtgtacggaaacaacccgtatacgcgaacgtataccatattcgtatattccataagtcgtagaataggaggtatgccttatacgtaaccatgacaatatacaattcacatgttgttaaactgcatgaatttctaaaaattagcggttaaaaatagcatgtttaacttaggacaaacataaaaaaattaaaacagatgtagaatttgaaactattgtcatatgtgttaatttcgtagttgttcataacatattttaaaataaattaatagttaaatcataatgttagagacgtataaaaacctaatatgtctcatattttagagctgaagcagcatgttccccccccccccccccaagctatggtgcatgtatgctaatgaaggtaaaaaataattgttcattgaagtactttcgacagtgtcacactcatctggaagactgcatcaacaatatatccctaaagctagccatgggaagaacctttattgtgtatctctcaatatctgcatgcataatctactttgctatagagtaggcacatcaggtgacggctgggtattactcctccattgattttattgggtgaactgaaatttggaaagctcaaacttggtatattttaaccaattttcactcatattataatctttctgtttcaaattacttctcattctagtttcgttcgaagtcaaatatttctatatttgactacaatttttagaaattcatatggtttaacatcagaagatttatattctttatattttccatgagaaatacttctataatatataatccatatgttcttgatggccaaatatagaagtgtttaacttagataaaactgaacccaataaatttaaaacggaggtagtaagttcttttatatatgaagtgtaaaaaaccataccaatatatttatatttcaaagtatgtttttctactatatatgttagttttatggctagcaaaaatagttatgagaaatctactgatggtccaggttttgttttagtaattttcaaattagattacgtcctatgaaatcaaatgacatatatggcaatattatcaagtacagctgttaagaaaacaggcaaaattacaaacacaaaaaaaaattggcatcaaaattggctaaaaaaacaacataaacatatcgattcaacccaacaaagggcagcatatatattctacctttggtgtcaaacggtcaggtaaactcattgtcccaaaatgtccccagctacctacaaaactctcctctccctcccattttctttctttctttctttctttcttttcagtttcataattgcacgtcttagtatattcaacgctaaaatgtggaaacctcctgccagcatatgcagagtgagtaatacatgacacatggtcacatatattcagggtaacacatgacatatttactccctccgtactcataaaggaagtttgacttctggtttctataaaaatatttattgaaaagtgatatatgtatacttttatgaaagtatttttcaagacaaatctattcatataatttttacattttcaaactcaacaacttgagagttattcataatttatattcccaaggtttgacttaaacattgtcctaaacgacttcctttacgagtatggagggagtatattggaagtggaagggtgattgaagcgaagataaataataataataatcagaggttaactatcgctgggataattagtaccgcagaaataatacttacattgtgtataaaattaccactattaaatgtggcaattaaccatttaccacctaaatctacatgtcatatacacaaaagaattcacgtgcattgacccatgagtgataaattgttaaacgttaaacctaaaaattacaaatggttaaacatcaaacctaaaagttgcaaatggttcaacgttaaatcaaaagagtggcagatgcccctgggaacggagcgagtacactttaaaccaatgacatccggtcaatcaggtcgccgggctatcgaccagccatagcgccatccatgtcgcctcgcccatcgacatgtgtcatgtggcgcggccacagcaaaccgcagcagttcatgtcttcaagatctcgcatccgatcctcttgagtgtctgtcagctagctgatcgatgccattttgaagcactactggagatcatcttattccaaaaaaaaaaaagtactggagatggagcaagctagatagccttttgagctagtcaaatccctgcatatgtgctcatccattccatttctcctgccgtccttgctgccagcaaaagggggcacagtcctgtgtgtgggcaactgttgcacgcggtggagatgaccagccaaacatggggtgtttgatgcaatgttgcacacagtcctgcgtgtggacaatttgtttgttcatccaatgtttctactactaggtttatgtttgtaagcacttccatcttgcatgtcggcttgttgagaaataatatgatgtactccctccgtttcatattgtaagactttctagacatatatatgtgtctaaattcattaatatctatggttgggtttagttccgcaccgaaattggaagtttgactgaaattggaagtttaaaaaaaaaaagttagaagtttgtatgagtaagaaagttttgatgtgatagaaaagttagaagtttgaagaaaaaattagaaaggcctatataaatatggagaatgctagaaagtcttacttcgtgaaacggaggaagtagtcattttgggtgcttagatggcattgtgcttaataaaatttgggtaaaaacccatttttaaccccttgaactttacccgaagtctaattttcactctaaattacaaaaccggtatttttctccctaagcttttaaaacaggggaaaaatgcctgtaaaattactttttagtgattttattcaaaatggaggtggccttttcctaattcatattcttattgtttacgttttattgttgtatatgtcacttaagtaggtccagaactatgaaacttacctaagcaaagttcatcgcattagaaaactactgtcatgtactcatatctattttcggatattagctgattccatattaatttctttttctcaaaaaaaaacttagcaactggttgccataccaatatttatgtaaaatccttaaataacaacaattccaaataaaaaattgaaatgctttgaagtaaatatagttgtggaaaattcatgggatatttgactagttgctatgaaactcaagttgctgtgcttgatttgcatgcgcagacaacaaataatgccatcgatagacattctgcctttattcggttttatactaaagttgttttgtttgcatggtcagtcagccactgaggtaaaatctcctagatgtgatccatgctgaaaagtaagctacctagataacgcacatatgacatatatgtgcaggaaatatagatgtgagaaaattaaggaaaagaaggatgatgcatcaggaggcatatagcagatcgccaaagccagaaaatatgttaaatgttggctttgctaaacatgactctattggctgaatcacataatcctaacaaaagttgccgacatagtgcacctgtgcatgaaaaacacaggaaattatttcaggataaggaggaaagggatacatagggggcatatcatatcagatcaacaaagctatttccatcaaaaaaaaaaagaaagatcaacaaagctataaaatgtgtcgaatgctggattgactgcactagaaatatttgtttacttaaacaccgtgggagcggcgaaaatttagaacaccgcgtcagccgattagtcttactgttgatttcttgcatgtaaacataaaacgtcgagagtagtgtagtgtattgagattagtcttacatgttgattttgaatgtgcaggttgaattcagcatattatcctgtttgaatcatatatagctcctttcgggctaaccttctgcatgaagcgagtgcaaaataaagtgttctatgcacatgtgcgcacccctccgcactaagacacctaaaaatgaactaacctacatcaaataaaaaaacaaagagcatacgagatggcataccaaaacatatatcagggattaaatcctaatacccacgaatattattcatacgtaagtagtctttcaaaagaatttaatgagattagagatatgcagttggtttcactctctttgagcgtgtgttcaggaactactctagcagccttgaaatgcaacggattttgctcaaattatatttgggattttggttcaaaatttaaggtagaggcaattgtgtcatccaaccaaccaaagtggagtttgtttggatgggccggcccaatccaagtggaaagaagtagcccagcccggcacggaggcaagcccagaagaggaaaaagggactcaaaaagaaatccaaaatcctttcctttgcacgccgttccacgagatggcggcggcggcggccggcggcgggaggggcggcggggcgcaggccgcggtggcggagcagatagcgcaggcggtgcagtccacgtccaacctcctccagctcatggaggagtcctccccggcccaggtatcctcccccctccatctcgcaatccccttctctgcttcctttccttctctcccctctccagcggaggagaggcgcggcgcgcttggcggctgtacgggcgccggtggcggcgagggaccagcgagcagagcatagggaaagaaggggcaagttcccaaccctgattttctcaacagggaacaaggataattcttcgcctctttcttgtttcctgacctgtgagctttggccaagtcttttgtgttcggcaagttgagaaatcgtggatggatatattcctagtttggtagtgcacatttatggattgcaatttagcaaaagtgaagttctggaaatctagctcagatcatttctcagttgatgctcaatatactatattgtagtgaaattgcatttaaatggaacattaaagttgtaatgccatgttatgtcacaacactgctctttactacaatgaaacaaagtttggcctttaacaaaccttgttgatgtctagttgggagttctgttcttgcttgagcagtggtcctcttgtttcttttttatcctggcctcttgtaaagattggatttcttgctgaattgcttaaactatgcatcgatttattagctacaaatgagataaacaatcagatgcaccttgcacgctatgtcagaatttcaagtgggtctatttagtgtcacatacaaaataaattgaatttttcccagccaaaacggcttattagggaataaaaatgaatttgtaggtaaaacttttatatatatgttcttggtgacttaaaagccaatgctgaaaaagaaactatgttgaaaatatctcaaaatcaatctcaaaattaagtttgaaaatttaaaatttggctttttctttggctgattaggccatccgatgagagccgtaatctcagagtgttcagacaacagtgttttttattatatatttttttgctgtatagttcactccggtactctgtcacacctcattttacttcctcctctgccactgaactacttaaatgctaattcactaaattaaggagtgttggtatatctttctgtgattggcataaatatcttatgtactgctgcgagcctgtgatataccttaaacattgtactttcatggttactccgttttgttggtgtgtttccagttatcagtttctgaatccgattaatcacattagctaatagaggatctttttttcacaggctcacctggcaaaacttcccaagaaactcttggcaaaagcatctcttgcaaagaacacagggcaggtaaggaatacgatgaattacttcctgctgtgaattcgctattaaaatttgtgtcttctctaggtcctgcatcaactacctagtgtaatttcttccttggatgcttatatggacgctagtttgcaaaggtgatcttctccaattcatttcctttgcatacacattctgttcattagacaattctaagaatttattttactgattatttgttatgtagcccatagatttaaactgacagcgtggttgaagttttctccctgtatatcatctttgctaacctcccatttcaaactctgcagtgcttctcaaattaagactgttacacagctcttgtcaaacatggagaataaccagctgagatctatcctgcctgcctctcggttagagaaagcacagaagaaaactgagactggagaactcaggattgaatgataagtttaccaataggatataataaccaatctgtgttctcctagtaaaggtatatttctttcgactacctctttttttgtttgcagatactccatccgtttcaggttataagacgttttgactttggtcaaagtcaaactatttcatgtttgactaagtttatacacaaatatagtaatatttataatactaaattagtttcatcaaatcaataattgaatatatttcataataaatttgtcttggattgaaaatgttattactttttttctacaaacttggtcaaacttaaatcagtttgattttgaccaaagtcaaaatgtcttataacctgaaacgaaggaagtagtaaactacagtgtagcttaattttgttagtaaatgcttcctcaaaaaggtaatttgattgaagaggaacacactgggaattttcatctatagcatcatgtattgctaactacaatcatctacagactgcagcaatgatgattatgtgtctgtttgcaaagattatttattgtctaccatggcaagcaaaacaggaattattttgaaatagtatgtgtcagtctaatagttaagaaagaccaacgtttttcatggctcttgtggaactcataagtcataactagggatgcaatcctgctacctgcataaaagcccacttaatagttttttatttcctacttgctagtacaaaatttggatgaaaaaaaataactagaattgtaataaggaggtcaaaaaggcaatgtcctagttttcaatcccaaggaatttgagtaattttggacaaaaatgtgcttttattttttcgttttttacaatgactgccatttccataggtacctttgccatcttctactgacgaacaggaaagactgaagccttacaaatggttcaggtgttggctctgctcatggcaagtggacttgctccgttgctcataaccggtgtttgaagaccttgcttgatttggatggctgcgtttctattatgttggctaatatatttctggatggcttgagcacatcaaatatgttgttccatctggctctgtaatccccctaccctagtgctggctgcaaattcagtccatttttgttgttttcagcacaaatatatatagaaaggaaccgaaaacaagattcaacactcgtgtaacctttggttgtgtccacttatgaatttgtggatatagagactgaatttctgtccattatctttctttttttaaaaaaatgattcaacaaagctctggttttgacaaggacaaaactgtgcaaagtaatgatcgaggaggtgaactcattagtcacctgagattttcaccgagcaaaggcttggagatgttttcaagcgtaatcgggggagttcgtttgtatccggaatcctggaaacgccttttcgcacatatcaatcaattcttctcaagccgggttgttgattggaccacgtggcgtgacaacgcgtgagaaaaataattgggaattagtgaggataaaaatttgctaggctatgtaaaagaaaataaataaagaaaagtatctagatatatgaattgtgatgtgggctagaaagataaaaggaaacagaaaggatctagatagaccctgatgtgtgtgaagttaattaaaaatcgagatcaacggagtttcagcttttagtatccatagtttataaaatatagttacttcaaaattaatcttcccaaatcataaatccaaagtaagtgacgtttgtacacttcccaaatcaatcataaatccaatttgcacataaaatcaaatctataattgattattgatttttctgtaagaataagtaacggacatgctcaaacatattttcttaatacaatcttcattcgtttgacattgattgaaacaaagtaaaggatttttcagaaattggattaaggctgacaaaatatcttcaagattttttttcaaaaaggatcatagcaaggattatactagcaaggaatgccagcaggcgtgccgattttctagtataattcaaaagcagagagggacatttttgcggtcgaatgataaaatgttttatacatgtatgagagtttatcatggagcagtccaaaacatgaaattctcacagtggggccttattgggcccaagatttctgggcccatcgttcttgggcttgggctctcgatttccgacacacgcgcttccgctccagcgtcgttagggtttttctcccagccgccgcctcctctataaatcccacggccaccacaacggcaaccctctcacccgcagccgccgcttttgtttgcatcagcgtcctctccctcgaattctagatttgattgttcttcaatgtgttgtttgtttcacctctcgtgttcttgatcgttcttcatcagcctgttactgttttttccttgatttttggatcggtcaatctgttgatgctgcttgcgagattggtttggtttggtttggtggtaattatggtggtgaggttggggggcgggctgtgaggaaagaaaaccttgtgccggaggcggatgcgccggtgtcggtaacacaaaatcctctaagaagttctgagctcctcctcctttctctatcgtacgttcttgcgcaagatctcgatccagattgatttggtttttatgttttcttggccttttttttgtttgcttttctctgcgacgtggcttaatattggattggattgggtgttgcgaggtgatgatgaatgtatgaatgtctgtcaatcccctgatgtcacaaagtgatgactcctcatacatcccgacaggctctgatcgcaaaaccctaatccaccagccattctttacttgcctttgtctgaaatttgttcgattctcattttaggcactttttcgtgtttgtcttaatttgttcgattttggaattttctaaaagtaagttgatttttctcgagcagattttaaacaccatatcaaacaaattatataatttaacaagatacccgagaccagagaatacaggatttaatctcacattaagaagctcaagtaaatgaaaaacacaaatcaatatataatcgttacgtatttgaagcggattggcatgaaaggaactaatcagaggtctggttggtctgacgatatcagattcaggtgctcacagaagccagtgacccagtgttgaatgaaccaaaccaagaactcaagaaggcaagaatagccgtatcgaggcattccttttgtacttctgcaaaattctgaatgattcgaccacagtttcctagttcatccgtttcacaatgtaaattcattcaagcactttttatattcatattgatgttaatgaatgtagataaatatatatatatatatatatatgtctagattagagtatttggttttggagtaaaatagatcacaattctgtaaaattccgtgaaataagctcgaataatggcccaaaaaatgacgagcggtttgggaagcaagcgatgaaattcaaaaaacggtttggggagcacccgagttttagagcggtgaaattcaaccgaaattggtacttcatctgtactataatttgaccactcgtcttattaaaaaaaaatgtgcaaatataaaaaacgaaaagttattaaaaaaatttgtgcaaatataaaaaacgaaaagttattaaaaaaatttgtgcaaatataaaaaacgaaaagttatacttaaagtacaagtcacaaataaaataaataataattctaattttttttaataagatgaataattaaaaaaaattaaaatctattatattatgagatggaggaagtaatcaataaatccgtagtattgtttatttttttgggtgccgagcaattaaactgtgtgaactgtggtatgacgagatcattgttacaaacctcggttatcacgctttttgtttcaatttcaaatgaaattggcaaaagaatatactggaatgctttaaaacaggaaatagctaaggcagaatttatgtactaatatagaaaactcttgataaaatggtttgaactttgtataatatacgaaaggatatctccctttctactctgcacataaaaccgatgtaaataacaagagggactttgttttgaatttgaacggaaaaaaaggaattctatccatttttatttcccatttttctatttagttgtttcttaataaaataaaaataaaggcatataaaaataaaaaaattgcttttggaaagtgtcgaggagtgatcctctctagcgggtggtcgtgagaccccccctgtgagttcggccaggggatatggtgcgatgatcaagagcgtacttccgtttgccatctaactactagatcgctcacgagtctgtgtagaagacaagggattatatatgttcgggccgctgggaagcgtaacaccctactcatgtatgtgggattatgatgagttcttacgagaggtcttgagctcctggggaaacctagctgttcttcctctagagctcaagctattgagagtcgtcccttttctcggtgggcgaggtcctccttttatagttcaaggggataccacatgccccgttttatacctacccctccatgggacggggacccacctagcttggatcagaccgccattcgtgccttcaaccagaagcaaggtggttgtgcgtctctaggtggggcccagcgccgtcctccacctgacacaggggacgcccctgtcattccctcttaaatgtatggagactttggcaggctcatcatgtgcgggggacgcttctggcagtatgccgatgggacggggcatacccgtcctcattccgcctgacacagggcgggacgtggggtactgccacccgtccaatcgcttgtgaccggtcacagactggtcaagcccaattgacgtgggtcaatcgggcggcgccgcacgcccgcccacgccgcattaaatgcggcgtcggacggttggggcgccgcgcattgaaagcgctgaggggcactcctgcgccacccactctccccgccatgtggtggcccggcgggggcctcgggacagtgcgcactaagggccgaggggcgtgacatggcaccccgaggccccctggccacctcagcgttacctgatcgccccccgagggggcgggggaaggccaggccgcgcggccacgtggccagatgggaaggtgactcccctctactgtgcgtacccccggtcccatatcaccgacagaaagcgacaatatcccatggttaattggcttttatcaagttggtatttattcatagaacatcgataaaacatgctatgttgaattaaatttaaccctaagaaaagaaataaaatttaaactaaaatttcagtgtttaccaaaatttcatttagtatttttgtattgagatataaccactaggttaatcgtggttattaaaaaaccaattgacaatttttggtggacaaaaaggtttataaacctttggaagaatagaaaactatgcttacaatcacgtccatcatcaagtatttagatgtttatcaagtgagagatttgataatatatcactcatcaaaactatttgatatcttattacacttttattcacataaatagtaccacatgtggtatgagtattaataagggaaaattccaaaaaccattccagaagttacttgaagtttgacatttcatcctataagttattttgttgcaaatattcacactcctatttggttttgttacaaaaaccactccagtgtgcacatgcttaactgaatcagtatgtttttcttttcataaagcgtgagacatcaatatggtaataccaaagttaaatacttctatggaaattccacaaatagaattgctgatgagagcttaaacattattgcactaagtttcattcattgtgtgcagaaaaagaattaaatgaaacacggagaataaatctaatacaagtacttgaataagattaattcagccagcttagcctgtggagctctacttcagcgataacatattgattcggttaagtacatgcccattagggttgtataattttcccatcaattaaagtaaactgacaacgaaaaagtgtcattctcctcacacgccggtctccatgagcgagttttctgggcccgaacgtggcccggcccagcccggcccacccctaacccgcacatgtaaccgagctcgtattcgcgtcgtcgccctttctcctctcttctcctctcctcccccgtctccgccgctcgcgatccccaccgccgccggcgacgcgcgcgcggcggtcgccgggcgttgtgtccgcgccgccccgacgagccggctcgtcgacggagacggtgcggctgttcctccgtactcgtcgcccgccacctcatcccgcggcgccgtctccctcgatcccctcgccaaagcgcgcaaggaaggaaggctctcccccgccaccgacgccgtccgtccagatctaaggtatggatcgaactgttgttccctcctcctcctcctctgatgtaggtgtggttttccgtgggttaggtattcagtgtggagtggatgtttggagcggggttttgggaatttggattgtggatggagaggattcgttgtcatgtcttaattaattgtttgtagccagtaacctaataatgttctactcggtgataatgcatgctaagaatcgagtagcttgatcagttctgaaagatcactgcaactacaacttgcttgcatgttaggatcagtaaacgtgtttctttctttcaaagtctttgcgctggtactagaggactgaggggagcttctgagagctcatgtgacaatatttttggtgtcttttttttttcttcaaggagacatgaattgctgtttacttaagcattgttgtctgagagtacttgatgtgagtgctatcaagaggatcaatgtgttgtagagaacaccatacacagatatgccattggcacttacaactttaacttttgaaatctttcatcttaaaaatgaaaatatgccctgcttggatgtatcttagcacgtcagtagggtcagttagatatttccttcttagaacctatgttttgatgatacaaagctataggctagtgatttcatttattccgaagtgtattcctcaagaatagtgagttacgagccaaacagatgtaatgcttgaatcaaaatcatgtagtctctctgcacacagtacaattttctttatgcacttcagactattattaaggtagcatgctttttagaagaaaaaaaaaagcatactttagtgtcatgtgctcgctgtctgcaacaagtagaatatacacaaattttgcctaatttgtttgtagaatgtcaggatgtaaggctgtaataagcagaaacattataattatataaactttgtctggatcagtataaactgtatgatttattcactttcgcggttcttaaagcatgtaatatggtcttttttttcagtcctttgtggcttttttgaaatctagctattataattacttaaaaattcaggaatttgatgtatgcttctgtttctttagtgcctgtgcaatttaccggatataaatgcagcgaccttgtattttgactctgaaattatttacaatttaaaatttaattggccctgctgttccatttacccaacctggaaaagcatgccttatcttggcatttggctattgacttgcccattaatagaaaaagatagtaattatttgacatttgtttcatttctccattcatagaatcaaaattattatgtactgggattaccctgtcattcttttatgacatacagtatgaatttgtatactacctccgtcccaaaatacttgtcgctttgagattttgtttgcaacgtttgatcattcgtcttattcaaaaaaatataaaattattatttattttgtttgtgacttgctttattatcaaagtattttaagtatgacttatcattttttcatatttgcactaatttttcaaataagacgaatggtcaagcgttgcaagcaaaaagtcaaagcgaccactaatttgggacagggtagtatgtattaattttgtttatacttttcatatgccagactgcaatagtttcagataatgttcactgttatttttccagatgctgccttatttttatccattttattacttttttggttaaatggtatgcatatatgtcacatatgttttggtttgatgggtccaaatctgcagtggtggcaatactctaagccgctactttcatcttaatactctttttatttcaggaaaaataactttcagattatttcttgttcctaccttttttttaggttacttatattttagggtgattcctgaaagcatttaataaagtaaattactatgtactttagtcctagtaatgatactgtgaattcaatccattggggaaaaatatcctatgggagccttggattgatggattgctccaaaggaattccgacttccctgcaatgtaatggtaaaactgggaaaggattggagttatgtagttattaaaatgctttagcagtgctctggatcatgaatctcttgtgactggtagaaaaacacctttactgcagtgcttctagaaatgtgaagtatgcatgattcactaaaattcactatttttatgttttgcatcctgaaactcttgaaattttagtcattgtaattacttaaaaaactggcctatatatttttttatatttgtttttggttgtctaatttccaaaggaaacttgttcatgagcctgagtttggtttacattgcaggttgggcatgatcactcaaccttagagatttttgtcattccatttgtgtaacctgccacaacacaactgaccttggcactattttgttgttttcccatgagtgcttaatggattggatagttagagttaccgaatattgcatgtaaacgtagcacttgctgacttatgagtggcttcaagtctcattgaggcttagtgcattacattgcttcacatttggtagggtgtatgtaagtttatttcgctatattgatcttagctactgatttacacaggttacatattatctcgattattttcttgacttgatagctattttggcagtactatctgatgaatgaaacctcctataccaaataagggttttcatgttctatggcctccaccatttttaattatcttctgcattctcatacttcattaaaattgcatttacatatccataaccatttattctttgtttccaggttttgacacaatggggttattcaagggcagcttcacattcatggtgggaatgggatgtggtgtctatgtagctcagaactacaatgttccaaacatcaagaagcttttcaacacatatgttttcatggcaaagcacatcgaggaaacgtatcggaagccaaagaaagatgatgactgatgatttccacagattttcattttggtgcccctggaaatcaacgtgtaactaacatgatacagaaatatgatgttcatgaatggggaagtcggtaaagtcggttctgatcgtcggcaattgaactatggtggcttaaatgctttaccggtgaaccactgtttactactttactatactgcttttaggggggttgttagagagacagaagttgctgtccagatgacaatgactcccttttatcttttgtcggtgctacgaaaatgcacttgacctttttttggctgttgaaatgtgtaggactggaaatccaccactattatcatgtccatctgtatatgtcatgcttagattttcaagaggccactgtttactatactgtttttagggggttgtcagagaagcagaagttactgtctactcgatgacaatgacttccttttgtggtttgtcggtgctaggaaaatttactagaccttttttttggctgttgagatgtgtaggcctggaaaatttactactgttatcatgtccatgtgtatatgtcatgctgagactaacttttcaagaggtcactgttgtttgtgcatgcaattatgggggtgattaatcggaatgacatgctgaaactgtttttcgtgtgattgtcaagcttaggtggatatgcgtgatcaacgttgcctaactagtgatttcagtatttcacatgtgcctaatgatattaacaccttgtaagcatatttaactgaaaatagacctttatcatcatagtgccacgcccaaaaaccatcaagatcatctcgcagtggtatggctagtatgattgatgcatcatcttgattaaaaagtttgctagaccagctgtgagtcccattgcaaagttatacgatcaatcaactcattaacagtattcaacagaatactgacttaccgagagctaactctccttcttgtgcccctagggatacaaggatcagtccagacgtttatatttcatatttgtgcctttacctactcgatatatatgatgccttctttagtagctccaaataaccattcaatctgtactgtgtttctcaaaaaaaaaaaaaaaaccattcaatctgctgcgccatgtacaaggacatatgccttccattgcttcagcattcaacacagtaccttcagggaaattcttttcatgaagaattcttgcataaagagaatttggttcttgtagtgtatgcttggctagcatagcagattgaaaacaggagatcatgaaacccgatgcattttcttttttcttttatcttgctggcaccaccaatatcaactaatcactgcactcacttcatcacaaaaactttttgtaaggtcaaaacatgacataggttaggatcgttcgagctactgccttcacaagtaccccctccatctacttttgataggcatattatcaaatttgaaaaatttacttttgataggcatatttcaattcaaccacctatgctcttaatgactttctcggatttaatgcgtgactctccattcttccacaaaagattggctacatggacatcgagaaatgtaaatattaatgaatctcgcttgtttacgaggaataactagtagcatgtttaaatgaatgataagtagaattacttatccttaatcattgtgccaagatgaaatataactatcaaaagtatatggagggagtatctccttgcttgcctttgggaacattttttttctttccacccttgaattattttccagattttatcttggcaacatgctagcagctggctcataattttttttaactaaacggatgacttacacatacacagacgccactgcacggtttgagtttgtagacgagtattgctatagtggtgtccccattaataacaaaaccaaaaaaaaaaagtgcactaagattgacacacagaacatgataggtaagccgcataatttttagccacttttgaataagcaaactagaagctgtcattggaataaaaagaaaacatagtagaatagcaaacccctcattgctaaactagctactctgagtacatggacattattaataaaccttataaagttcaaagttctataactttcttctagatcactgccacatatgatactgccacatatgatagaatactagaaagattcattatctccacctctatatggcaccaagaaatcatcaatttcctacatattggaaggagagtactttccatggttgtgatgttgacttgggaataccccataccagcacatggtacttgccaaccttcttatactgatctgcaattttcagcactagaaaatagttgttgccgctgcctgcaggctgcatactcactgaaagcacatccacaagtgtgatatccttgttcttcaccagtttgtgcattagcactgcaaatcgcccaatttgccaatacaactcatcacggtagttagggatttgcacgtatcctggtggcgtccaagatgggagagtgaacggtggtggtgaccagccccaaggttgatagggtgggggtgttgatttgggactaggaggtggtggtggatggctattgccgggataagttggtggtgtcataggaggactaaactgctgtggtggtgttgtcataggtggagggcttgatggagttacacttgggggactagatgaaggtggtgatatggtaggtggaggggttgatggaggtggtgaggtgctaggtggaggactcgatgaaggtggcggcggtggctggctgtatgatggagctaccgtcgggggactagacggaggtggtgatgtggtgggtggagggctcgatggaggtggtgaggtactcggtggaggacttgatgaagctggcggtggtggctggctatacgatggagctactgttgggggacttgttggaggtggtgatgtggtgggtggagggctcgacggaggtggtggctggttgtatgatggagctaccgttggggcactagacgaaggtggtggtgtggtgggtggagggctcgatggaggtggtgagttgctaggtggaggactcgaagaaggtggcggtggtggctgcctgtatgatggagctactgttgggggacttgatggaggtggtgatgtagtgggtggagggctcgacggaggtggtggctggttgtatgatggagctaccgtcgggggactagacgaaggtggtggtgtggtgggtggagggctcgatggaggcggtgatgtgctcggtggaggactcgacgaaggtggtggtggtggttggttgtatgatggaggtactgttgggggactagacggaggtggtggtgtggtgggtggagggctcgatggaggtggtgaggtgctcggaggaggactcgatgaaggtggcggtggtggctggctgtacgacggagctactatcgagggacttgatggaggtggtgatgtggtgggtggggggctcaacggaggtggtggctggttgtatgatggagctaccgtcgggggactagacgaaggtggtggtgtggtggatggagggctcgatggaggcggtgaggtgctcgatggaggactcgacgaaggtggcggtggtggttggttgtatgatggaggtactgttgggggactagacggaggtggtgatgtggtgggtggagggctcaacggaggtggtggtgtggtgggtggagggctcgatggaggtggtgaggtgctcggtggaggactcgatgaaggtggcggtggtggctggctatacgatggagctaccgtcgggggactagacgaaggtggtggtgtggtgggtggagggctcgatggaggtggtgaggtgctcggtggaggactcgacgaaggtggtggtggtagctggttgtatgatggtggtactgtcgggggactagatggaggtggtgatgtggtgggtggagggtttgacggaggcggtggctggttatatgatggagctaccgccgggggactagatgaaggtggtggtgtggagggtggagggctcgatggaggcggtaaggtgctcggtggaggactcgacgaaggtggcggtggtggctggttgtatgatggaggtactgtcgggggactagacggaggtggtgatgtggtgggtggagggctcgatggaggtggtgaggtgctcggtggaggactcgatgaaggtggcggtggtggctggctgtacgatggagctactgtcgggggacttgatggaggtggtgatgtggtgggtggagggctcgacggaggtggcggctggttatatgatggagctaccgtcgggggactagatgaaggtggttgtgtggagggtggagggctcgatagaggcggtgaggtgctcggtggaggactcgatgaaggtggcggtggcggttggctatacgatggagctactgtcgggggacttgatggaggtggtgatgtggtgggtggaggggtcgacggaggtggtggctggttatatgatggagctaccgtcgggggagtagatgaaggtggttgtgtggagggtggagagctcgatagaggcggtgaggtgctcggtggaggattcgatgaaggtggcggtggcggttggctatacgatggagctactgtcgggggacttgttggaggtggtgatctggtgggtggagggctcgatggaggtggtggctggttgtatgatggagctaccgtcgggggacttgtcgaaggtggtggtgtggtgggtggagggctcgatggaggtggtaaggtgctcggtggaggactcgatgaaggtgacggtggtggctgaacggctgatgatggagcgactgttgggggacttgatggaggtggtgatgtggtgggtggagggctcaacggtggtggtgaggagctaggtggtgggctagatgaaggtggcggcggcgactggttgtatgatggaggtactgttggcgggctatatggaggtggtgaggctgtagatggagtgcttgatggaggtggtgacgtgatgggtggagggcttgatggaggtggtggcggcgactggttgtatgatggagcaactgttgggggactagatggaggtggtgaggttgttggtggagagctcgatgacggtgatggtggtggctggttgtatgatggggcctccgttggcggactaggcaacggtggcgacggaggtggactgttatcttggtacggtggagatgcattaggtggactagactccgatggtgatggcggtggcgacatggttggaggagacgatgatggtggcggctcgtaagagggaggtgccggcgaatcattcgacggtgaaggtgacggctctccaccaccttcgcaatcttcattctttcccggccctttaccatcgccatgggggtccggacctttccccggcttaggacaatgcgggttcttcaccggcccaaccccattgttgccctggtcacccttcccctcattacccttgccatcggctagggatacatggacactgagggctactacgaggaggatggggagaagcactacgagcgttctcatggtgagagaacgcctaccgtaggcagctaccacaacacaggaggtgagtagttagctccttgtgatgaagcatcagcggcacaatgccatgtatttatactagttagtttagcaagtagctagagcagaaaacctagctaggattcgcctcgatcagtagctcgatccagatcatgggagctgtgtcctgcatctgttagattaatccaaggtcagctcttaccagttactgcattatattatcactgtactagattacatgctcatgtcagtgataatttgagtttcactggtattaatttgcgttgacattgatcagcttctgctaaatgcacggttctccgcgcacgtacgcgcatggagagcatcttgtcagaggaggcattgagccttctgctaatttggagttgactccatccagaagtaaaccttgaacaagatctatcgatctatacctggattaattaattcttaatgctgctgctgctgctgcttaattgtgatgcagctaagtaccatcgatcgtcactgcatgatcatgattcgatcgagaggtgacctagctaatcgccattttcagaaattaaaataggaagtgacagagaaaattaagcaatatgtaatctaagctatgagagttgaacgagtgttgttatattatcgaggtatatatatgtaggattgtacaatttcctttcatcataatataatcatttaacagcaatttgtgaacctgtagttttaagtgtgaattattgaagaagaaagtagttctgctgctgccgcggcagtagcttaattgtaacatgcagctggccagtactatatcattgcatgatcaccattaattgtatgatcacacgattcgatcgagatgacctagttaattattaatcgaaattaattaacatggaaacgccatttttcagaaataaaaaggaagtgacagagaaattaagcctgtgcgagatctatcagaaagaaaaatgcaataaccttaattagctgtgagaggcagagagcgtgtgatatcgtaaaatagcatgaatcattgcacgggaaacgagaatggccggcccccttgaagaggtcaagtcgcctccatgtggatggtggcaagaatcacttgggctttgtagccatttctgcagctgaaattattattattatcattactattattattacaggatctacatagctaatcgaactgactttgtcaatgctgacactcacataacataatagagagaatgcttactttgtaaccatgcagagagagaaatttaattggcaagaaatggcaaacgagttcgatttgtgaaaccagcaggtgtgtcggcaacccatgctggttggggttggatcacatgctctctcctgaatctctgattaaccaatgcaaagagaggtagatgtgtgcagtaacaaccacacaccggtcggtctgtgaaaaaaaataaagtcctctttcacagtgcaattgaagcgagataaacttggttcacaacaatgccatgcctaactaagctggagttgttcccaaatgtaagcacgaggtagctggtgtgctggtggcagtgttgttcccaaaaaaaagagtaataatatttttaatcaaagataaatatattatgaaaatttattcaattataaatttaataaaactatgctggtgttgtaagtattactacttttttctacagaattagtcaaacttagagtagtttgactttgaccaaaatcaaaacgtcttgtaattgaaacggcaaacggagagagtaatatcaaatgagcgtgagcgtgtcaaaaaataaaaaacgggacgacaagattaaaaccacacacatctaagtatttaacactacactagcaaatgcacatatagatcatgagacttgaaccactactctagattattatttttttaatgtaatccactactcaagaattgatcagcctggaatgacagaaaacaagcttgtctagaagaatgacatgaaatatggtttaagacgtaggtgaacaaggtaacatggtcgaaattataagcaagttcatgttagtaaaccaggaaccaaaaattgtttcaagactaatgatagaaagcttttcaagcgttcatgaaatataaaagagagccacattggctcaagactaatggtagtaagcttctcaagtcttcttccagagtaccagtcaaaaaagagaacattggtttaagactcaattacaaggcaaagcaatcgagcagctaaacattgaaacttgccaaatgcaattcatccaactattgctgcctcttctaccaattagcagcagattccttcctacacgcccatgcagttcatgaattgctgctttgcagattatgcaattattccaattatttactatagataacttgacctataacctgttgccacagcgcatctttagttcctaaagagattctgacattccaaatggaagtaccatattaatgttacgctaacaaatatctaacgaagttcaaaacaaacaattcaatcaaatataatcatgacaattacgctagagaatacttgttgcctgccctagcatcattaacatcaccatatctggcgcaataacatatcacaaatcgaacctcttccaacaaacttaccaagcaacagctgaaaaaaaaaaccatgctttgaaaaatattgaacttgtctgaagaaaatcttgaaaccaaacctttgtcacttaatagaacacttcacatatcagcatccaccagttactttgtgaaattagatgattccatgaggctctaaaaacatattgcggcctaagcttaagatgatataaccttcaacaaaacaataagacaaatataaagaaacgaggtttcacaacagattactggattgttcggcggcaaggtaagaatttgacctgaattttacaagaaaaacagtgcaacaggaataccacaaaatccccatgatccaagtgtgacctaaactaattttccttttacaacagtgtccactagcaagaggtcttccttaccagttcagttaaatatatcatacgataaaatatattgcattgaagtcagaagatgtaagagctacacagatactgagaaacttgagctatataagttcattgactatctgcacctagctttgagcaacattactgatttgttgaggatccagattttcaaacataacaaaaatgatactacctctgtcccataataattgtatttctaggatttgaatttgtcccaaaataattgtcacaatagagtaatggtcccattaatcacttctcattcaaatttcttcctattttaccctcaactatccttccactcttacgtatacatcatttaataagtggcattatagtctttcttctcaaatcttaatatatgctaaacaacctagaaatacaatttatatgggccggaggtagtacaattgtagctccatctttttgtagcagaatcttttcttctcagatgacatgaatagacttcaaagaaaatcattttctaacacagatttaccaactgggtggtttctttgtcacatctcctctattgaggacaacttatttccactttaaaaaaaagaaaagaaaatgatgcaaaacaaaggaactgcaaaggggaaaaaaaacataaatgggacaagtataggcaagcttaactcaaactgtagttcctcatcacatatgcaggatcataaaccaaataacaactagatcatggttcagctactagaggtctcaggatccaacttaagtattttccataatagcaccacctattcaagagtcaagacctcactaagaacttgtgttcctactagatacccagcagaagatgcaactagctgccaaccaagtgccattcaaccaagctctcatttctctcctgtgcctccccctccttcctcaactctgtatactcgagggtaccctttcctaaatcctaacccctgccaacaaactattgcaactaaatgatgctgcggtagaggcgaatgattccacttactgtcaagcgcaaccaatcacaccaaatggtttgcttaataatagtagacaacaagggcatatgtcaagatggtgtgttatacttggttttgtacagtaagtcagtaactagataagaaaaaatacattaaaattgtattaccttgcataactgtatatgcaaacaatctgatcactagaaaaatgagattaaataaaataagatgtgcattactgcattccatgatataaaatcacccgagcattttccttgagttaaaagcccacttgcaaactaccttgctaactcaaaaaacgcatgcatgtaaacacatgctcacaaggaaacatggctacgcactgaccacccaacaatcatacatcactgagtgttggcatctcaatataatgaaatgcccatcaatgtaatgatgatcgataagggtgggttggcactataaggtaaaatgagtgtcataaacacttgtagtgcagatctccagaagctgaagcagtgacaggttctaagcatagcaatatgtcaaaagtacagaaacaaacatatacacaattcttctctaattaagcataacaggacagtacatgacaagcggctaccaatcgatcgtttacatactttgcagaaattttggtagcagatgtaaactgtaagacagttgatggcacggtagaagcatgtcttatgcagcaaaaagaagagaaacaaactatctgcataaacatgttttgcagctaccattagtctgtccctatgaaagtaagagagcagtaccagacttcatctagtattcatttaatcatcctgttttgtgtcccagtctttcatcttcttacttccctttggtttggcaataggagcattcatgcctgccatttttgcattgtactttgctcgcaagggcccatttgtagcccacctgaaaattcatcaaaaagtaaatcaggatcatgtttccttgttgatacaaaaaaggaaaccataggaaataactcaaaaagaaatgcattgagctgtagcaaccaacaagataagaaaggccaaaacttgatcccgtttatatatcaaaagaagctcaaaatcttataacagggtaagtggtcttctcattgggagtatctaaacggtgatctttctctttagccaaccaatatttaattgtttaatgtgaaaaaacaactactaaataattgcagataagacaactttttcttaaaagcaatctgaagaagatttaactagctgaatgatcaatataccagatttaaaacaaaaatgtagcaagataggagtacatacggtgcattccaatctgtagtatcctcattaacaagatgtgtccacttcgttctgccactccgtccgaagtgcttaacttgcataaccttgggcaagatgcttttgtccatcttatcttcaccagttggtgcagagaaatcacgagcataaatatcatctttaccagctgattggataacatcatcagcaccttcctggaagaaggcacccttgtggtaatacttctgcataaacttccacttctgcttgttctcacgaagtggcttaggattctttcgctcccattctcgccgctcctcctcggtcatattccgcaccttctcaatctcctccttctccttcaaccttgcatctctttcttccctgtccctcttgattctagctatttctcgattcttccatgactcatactcctctgcttcattcaactcatcatctgtatcaacatcctcaatgttggcctcctcattgagtgtcttctcaatatgctcctccttcctgatttcttccaccacaatctgcctagtctcgattttcctagcctccagcctcttcttgactagctcctcaagctgccgctcctcctcctccagccgctcgcgctcggcaatggtgtcccgctgtgactttggtatgaagacgggcttcaccatcgccatgcccgtctgctcatcctccgagtcagtctcatactcggattcctctgattcctcctcctcctctatgggctcctcctcctgaggaagcaactcctcctgctccctcaagagctgccgcgcccttatcctcctcctcctctcctcctgcgcctcctcatcgtcctcctcctccagctcagcctcctgcctctcgttctcctcatccacggtagacacaatctcggcctgccgaatcctccggtgatccgccctcagctcctccttgttctccgcgcgggtctgcgcgaggcggcggaggcggcggtcatccttgaggggcggcgcgtcgccgtcctcatccttggggaacgccttgtcgagagaaaccttattggcagtccggagatcggcgtcgtcttcgccgtcgtcggcccactcgggcgccttcccgggccagtaccgcttcaccttggtctggccaatcttcccgcggagcttgtcgcgcaccgtgatggcggcgtcgctaaccccggccgccaccgacatggctgcttaccgccccccccccctcctcaccctcacctatcctcctccacccctgtccgttccctcgctcaatcgaacactgcaaacacgcaaaatccaacatcaagcccccattttctattgtcgagaactgcgattagtgctatgattaaggcaatgatacgaagctcccggatccagaagagaagctagggttaaagcgaattcgagaaaaagaaaaggtagggttagggttagcgcgaatccgagagaaaggtgtgggggtaggaaggtgtgtgtgtgtgtgtgagagagagagaggatgcgcgcacgggcgctcacctggccggcgagggtgcgggcggacgccggcggcggcgcagggcggcgcggcgcggcgcggcgggcgaagtcgcggggagacgggagtggaggccgaggggaagggggcagatcgactatactagtagggtgggcttcccgtaggccaaagcgcggcccggtctgaatcgacaaaggcccactactgtaaaccgactatgtctcgaaaaggaatacaataaatcgtcatcaaataaaatggattcaatttgagatttaaatttcttagtttgtgtaatataagagcattcctagccgatatgctgtcacgtcctccatccagaaaatagcgcactcacgcgggaagaaaatcgcgctctagaagataagccgtcgttgacttcaagcttatcgtgttcgatgtccgggagagagaactctcttcatgccatattgcaacttcttgcgttcgaaccgagctcccacctcgagccaaattgatggctcgtccatctccattgttgttgaccggatctggcatgtagggtggagtagtgaaggtggagactaaaggtaagtgcacatcctaatctagagatggggctggcaaagataagcccacgctgcacgcagcttctctgtcctatcacccatgctgcccacagctactctgttctcaccgcccatgacttctccgccctgccaccccaccgtttgtaacttctccccacacgcatgtgtttttgtccactctaaccctcgccgccctccctctgtcgtcgaccctcttctcagtcctcctccttcgcccttcctctcatccttccctcctctgtaactctctcctcttagtaggcatagaaaagtgaggaagataaatatgcaaatatagtacgatgtgatttggagaatgtaatatgaatgatacgttggaatgaagagggatatgaaggatcaaatttagatgagttgctggcaattttcccttctccttatgctatttgcaactttagaacatatactagctcatatttctttgtcaataatttcaattttgattacgattcattcgataataaccttatttgtttgtgaacttggtggattacatgattggtcagaaaaaggaatttcctctataacatgattcttcatttctcgttgggcttctttggaacattttacattaagtaactagatgaaacccagcgcattgttgtgtgcacttctaggtaacaatcaaacaaataagtgagaataatctgcaataactatattcagtgggtaataaataagttatagtggagatttatggcaatcgtagggaataataactgcacacaatatgaacgttgagatcaagcatgggagagatctgacggctcttcttgcggcttcacgtatgttgatcttgtcgttacaactatatagaaagaaaaaaaaaatatatgtcattgatcctcttttcatgggctctatatattcttcctatgattcccaagatacataactaatagcatttctaaaacaaaataaaataatgcatcatatcttacatcctatttactacttggaaccaaaaactttgacatgcattgagacacatcatctagaaaatagtagcctttcgatcatactcatgctttgatctcaaccattcatgtcgtgtgcatttacaattcacttggtatagttattgctatagacctcaatgtgtattgaaccatttcaactagagaagaaatagccattggattcctagcatgtatattacataagcattcatgtttcaagtacaattggaattccatatcaactttgtagagcttaagatattatcattttaggtattatgagtacataggatttacaaaaaaaaattctttcaattttcttcaaagtgtttacaaattccgtgctacaataatgtgcgggatatctactaatatacttataaagttaatccccactaaatgtagttaacaataattgtctcttctcttatgaaaccacatcacttcaattctttttagcctttggatgattgatcaaggtgcaaattacctcttttcgcaaaagccacaccatagatttgaagtaattattctgtttggatattgaccaaaggtgcaagatatgaaaaccacatgaatgaaatcatataacaagaaggaattatgcaactcatatatagtactattttatcatgcaaatttccagcagcaatgcatgagatttttgtcaacgttttagatcatgactatggtacttgcatggtatgaggatcattggtaccagggtatatgcgagattgaggtaaaagaggtagagacaaggatttttatacaggttcgggccccttcacatgaaggtaataaccctactccggttggccgaagccggtattgctcttattcatcaaaatcacataagtacaatatttgggataacctatctagtcgtcgtcgacttggtgacatggaacaccaacacgtagtcaacgacagggtagtcttcctccttgaatatgtactcggcgagatcagagatagcactagatccctcttgtcgacctttgatggcaccaaattgggtctgtctaggctgatctgatatcgatgtctggcggcgtgtattggtgtctattctgactgagcttgttggtttgtctggggttgtcctcccttccctagggggccgggtcttgtatttatacccataaatgtccccttgtccaagtagaactagggagataagtatgatacaatccgagtagtccttgtagttttcatgtagaactttgcttgcccttccttatccggaactccttttatatacaaggtatgattccatataggacttggtatatggtgggccctatcgtgcttaatcgactactattaggtatgtgctatccataaccctgataaatttcctttagcaaagaatgataactagaacaatgagaattatagtcgtcatcgtaaatatagtgatttgaacatagggctaggtatttggacaatagtttcacattgaacggcatagcaatccatttcagttaacatataagtttgcacaaattcgcatgctggaccagggtaatttagaaggggttgtattgatgttgttatggccttatgaggtgctatggagtaaataaaaatagagataggaacttctgctaactaaagttgtagggtgaatgaactagttacactgttctaaaaaaaaagaactagttacactgcatagatatgatttgggttgctaatttgtggatttggtgaaatgttgcttgccctagcccaattagcaagactttgcaaatttatgtggtcttgagtgaaaaggatggctaagccctatagtccaatgcggaactatggtcaaaatatctcacacttgtaaaaactaagcaccaccacaaaaacctagcactgttgccaccaccctctgttcactccccctcttcctctctggcaagatgctggtaaggagggggagggcatctatcgctctagcagaactagtagttgcttatgtttcaacataaataaagtttctagtagttgcttatgtttcaacccaaataaagtttctatctttcctcatcttcttcaatggtaatggtgatggtgaaatcttctagtgttggttcccaggccatcttgcttcggtggtttcatctataggcgagcttagctatgggatttgtgtccatggcatcatcgtccttgtctcaaaggagttgatagcgatgttccttctaataacggtcctttggctctctctcttgctcactagtagtctatctggcactagtaaagagccagtggggctcacctggctctctctgtccccaccttagttcaggatggcatgccacgtgatatgtcctgggtcaactaggggctagccttggaacgtcctcgatcacagccacacgtcaaccctctactagtggtgttgtggtaggctgggatccacgcaggtctccacatgtctttttttccggtcaagagccatgcagatggtacctgctcgggaaaagccgcatggttggttttgacacacctaggtgacccagttggtttgtgtcttgatctcatttgacacatgatcctcatatacttctcctagtgggccaaggaagcaaactcaatggcttggttcccatcccacgtgctatcaacgatgtgggaccctatatttgggacgctgataagggttttttttatcatagtttatttctcatcattagcttttgaattaaaaaaaacacaaaaacaacatttttttatttgtaaattattattgttgctaattaatatgttgttttacagcaattgtaggacaaatgatctagcagccctatatataatcaagctacgaagtctttcctaggtcaaaagagaaataacgttttttttagagaagggcactacatccaaccggatatatataaccatttaaattgaaaatttagccccgcaaacgactcaatctgaaattcagtcctataaagatttgaactcacgatgttggagtgctactcaggtcactgcgaaagagaaaaaacacacagaaatataaatattagtaatcaattgagggaacatttgatttgtcttagaggaaggaggagtactcgactccatgccctctcctcgaacgttcgttcgttcgaaatgattcttgccggggcgccagatgtccccaaacgttcgaaaaaacgaatcatgccggccgcgcgcggccagggtgcgcacgcagcttgccatgatgcccaagacgtccaccacaagtattcccaggaatggatgtcaggcacgttgccaaagtgcgtgcgacccctgcaaacttatttctgtcggtttaatctctctcgcagctacagaagatatccccggttaacagctagctatagctttgcttccctcgatccctgaacccctctcatcattccacacgcctcctacgtgcttgcatgaccacttggagaaattaaccatcgatttaatttgactgttgatcataataatatatcataatctggaaaacgaaattatttaattcgtttcaaaccgctatataaatgtcccaaatctatcagtgcttcaacacacacatctcaggaaggtagctagctagaagcaatcattcatatagatcgagttgttagccatggcggcgaagctgcagggaggaggaggaggagcggcggtgatggcggtggtggtggtggcgatggtcgccggcgcggcgtccggcggcaacttctacgaggagtgcgacgcgacgtgggagccgcagaactgctggtcgtcggacaacggcaagagcctgtcgctggcgctggtcagcaactcctccggctccatgatccgctccaagcggcagttcgtctacggctccgtctccacctccgtccagctcgtccccggcaactccgccggcaccgtcaccaccttctacgtacgccattgatcacccccatcgatcgatcgattatatatatatctcatcttcgatctgcatccatttccttccgccgatcgatcgatcgattgattgattggtacacgattttgtgcgtgcgtgtgtgatggatcgatgcagacgtcgtcgctgggtgacaagcacgacgagatcgacttcgagttcctgggcaacgagaccggacaaccctacaccatccacaccaacgtctacgccaacggcgtcggcgacaaggagatgcagttcaagccgtggttcgaccccaccgacggctcccacaactacaccatctcctggaccccctgcaggatcgtgtaagcgcacacacacacgctcacctacattcaggcagaggcggagccaggtgtggggcagcttgggcccaggccccacacctggcagaaaaaataccaaggaatttactaatttttttattaaaattcgtttaagaagttcatactctagtgattaagccccactcttgacataatcctggctccgcccctgcattcaggttttgcaatttcgctttcggcaaaaatttcggtcatttcaatagaaccgaaatttccatattttttgaccaaaattttctgaaattttaacacaatttaactgaatttaactaaatttcgtctaaattcaaaaaaaaatgaaaaaaaccgaaagtttcagtcgagatattgacttgccaaaggggggggtccgaaattaccgaaatttcaatcactgcctatattgtgaaactggtcggtacaagcaacttaataacggtaacaattaatgcaggtggtacatcgatgggatgcccatcagggtgttccgcaactaccagagcagcaacggcgtggcgttcccgacgtggcagccgatgtacgcctactcgagcatatgggcggcggaggactgggccacgcagaaggggagggtcaagacggactggagcaaggcgccgttcgtcgccaactaccacggcatcgacctcgacgtctgcgagtgctacggcggcgactgcgtgtacggctgcgccgccgcgttcaaccagggcggcggctgcgccggccagcagctcaccggcgacgagatggggcagatgaagtgggtgcaggacaacttcaggatctacgactactgcgtcgactacaagcggttcaacggccagatggcgccggagtgcagcctgccacaatactgagtgctgaaggatcgatattgcaattgcaaagtttttgctatatgtgcaatcatcttttgagagatgttccattttttgctacagtttcctctcctttttttttatattaagggtttgtgtctttgatcggtggttatatatctgaatccaataagtttttgatcgagctcttttttttgtattcttttattttgttttgatgcttgtaattaaattatatttttttggcatgtatatgtgcatgccatggtatatatataaactatatgtttgtctgcaatacagttacatattatctaaaagaattacatatcaatgtatcattttattacattttggatgctatatgagctagagttaccctctcaatcatgtagtggtgtttgtgcgtccacctctagctaccatgtaattaataaaaatcatatctaatttttacattctctctatgtgtgtaagtgtgggcatatgcatttgtagtgtattttagatatttgccctttaattaacgagctaaaatttaccatgctctttatgcaaaattaaagcccacagtcatcagtcatatttttctcgatagtatattaaagactcaaaacagtatgttactaccttctaatgatgtctgatggagccacagtgacaaaatatgatcatcattattcattagtagtacttctcgtctacattttaaacaaagtcatatggcccaacgacctatctgttcgtaggacaaccatgaactgtgcgtgccccccgcaatttaggattggatgtatagaaaatctttcatactagttttgatcactctgctcaagagcaccagtaatgccattcaccgcttaaaaaccatttttcatcgtaccaaccttttttttactgggaggattaaaaaaagtcaggcttgtaaaatgcattgaaaggattctagtaacgaactgctagcaaaaatcaattttcaccggtggtgaatttagaggtcccctgaagtcgccgttagcgtaaatcaattttcagtagcggctgataaagagcacccaactaagttcctctcaccctggaccctccctactccctccagcctccctacctctactgcacgtgacgatagcaccaacgacggcgacgattgcaacggtgacaactgcaacaagatcaagagaagcgaatttgacgccaatgggctcaggaggggtagatccattgctggtaatctcgggagttgcagttcgccgcctagtcctctgttgtcataaagaggagggggcgatggtgctcgagaacaatggaggagttgaatccggagcttgtcatatggaggtgttgccgacgggtgtgcacagcctcctcgtgcccttcctctctccctctccacctcccagtcctagatacagacgagcttctcctatgggataaggggagggaacaatgatgatggagggagaggcctccaactccagatccagtggcaccgaccattcctctctcgaatccacatagtccgttggctttcgtacctgttcggtgatggtgacgatcgcagcttggtgatgggacgatgcccacagatcggtgactgcagcagcgacctccacggctccacccctgctaggctgcctcctcttctctctaatctttctcgtacatctgggtcgaaattgtgaatggattttctccattttttattgattatggaatatcgtgatgaattgttctccccatatttgcttgatttgtgtttgatacatggaaattgtggattcagtcatgtgggcatttttaaacgatactattgatcaaacgcatgcaacttaaagcgaaaaaaaaaccaacaattatttttcaatgggcggagtatatttgttagtttctgtgtttctttactatcctttagtcatttaggatttctactacgtcagtttgagaacgtagggagtatgaagtttagtagaggtgaaaattcaggaggccggctagtagaattgttgaaagtgaatttcaggaaaccccatgtttttttttcagttacagaaaacattagcaacaccacattacatatatgatgacatttgacaaattgctacctaaatacataagatctaccatgtacatcacaaatggcatttgccatagctcagctaagtacaattataaaagaaggcgatttggttatactacgtgatctaagcagtagtagaggattagtattaaatcgctgaaattaacaagtttagtttgacctataagcatatctcacaacaaagatcctgcatacagtttttatggtacttatacaaaacaggggcaacaaccgttcataagatcatgatggtgacaaccaattaattactactcctgatagtagctaaaataacatgcaggcatgtaaactcaggtttatatatatgtctcttttgaacgagacagccaacaactccaatctgattcatgtaccaatgggcagagtgccaattggaaacaggcagctcaattcaagcatgcagagcactaaccatgtcaaaaccagatactgactgactagtttaattaagaggaacaaatcaagacgcgtttgcaaaaccaggagaagattgtacacaaaagcataatgcagctggcagcactatgtacaagtgtacatcgtgaagagaattaacaattatctatagcatcatgggagccaaaaatcttctgttgattttgaccgggaatgatcagcatgcacgcagagaaacatagattaattcagagagtttcagggttggataacagtgtgtatataagccccctgtctccctctgaatttttcatcctgttttctcatcagcatttctctctcaacctgtgacactttgtctgaactttttttgctcgagcttttctgcaacgagaggaggacgacgacgacgatggggaggttgagcttgcttctcgtggttttcacggcggcggcggcggtggttgggctcgccggagccagcttccgcgacgagtgtgacatcccgtgggagccccagaacgccaggttcaccgacgacggcaatggcctctcgctctccctcgtcagcaactactcaggtcacgtacacaaaacctttttcagatagtttaatttattctgacgaattaccttcaattgaaattcgagattgatcagctgaagcaaataattaggcgtgaaattttttttgatactattatacctgctgcgatcggcgattaatttcttaatttgttacataattgtgcaggctgcatgctgcggacaaagaagcagttcatcttcgggagcgtctccactcttatccaacttgtccccggcaattcggccggcaccgtcaccacatactacgtgcgtgggcgtgtccttcattgatcgacttgttctttctccatcgcaaaaattaaccaattgtttttttcccattagctgtatgttttctatcgataatcgaattcaatcagtcaatacataagtgcatcagggcatcgtacgtaaggactaaggactcaattaattactccgttagagaaactatcttttatccaggccccaaaacataatatctcggttaaattaagaaccgatattaaagatgctttagcaccggttctaaaagttcaaatatctaaaaacatctttagtccaagttctttcaatcggtagtaaagattctcgatttacagctggtctcaaccggtactaaagagggggtttttaactggtattaaagatcgtttctccagtagtgatatgattttgattatatgcatttcagacatcgtcggtcggagacaaccacgacgagatcgactttgagttcttaggcaacgagaccggccaaccctacaccatccacaccaacatctatgccaatggcgtcggcgacaaggagatgcagttcaagccgtggttcaaccccaccgatggctaccacaactacaccgtctcctggaccgcttgcatgattgtgtatgcacacaagctagattttaatctttgtctggttgttgcatcaaactcaaataatggtcgtgatctggatgagatgcaggtggtacatcgacgggacacccatccgagtgttccgcaactatgaaaaaagcaacggtgtggcgttcccaatgaagcggccgatgtatgggtactcgagcatatgggcggcggaggattgggcaacacagggtggccgtgtgaaggctgactggtccaaggcaccttttgtcgcgaactaccatggcctcaacatcaatgtatgcgagtgctctactacctctggtggaggcaacagttgtgctgcaaaatgtgcttcaacctataatagcaagtcatcagtatgccagttgagtgattcagagctcgcacggatgcggaaagtgcaggatgagtataggatctacaactattgcgttgatcccaagagatacaacggatctgtaccagtcgagtgtagcctaccacaatagtttaccagctgctatgagtatggatattttttatgagttttgagatttatttgatgattttttttctattcgtaaatcttacattatttgctcttaaaacaacttgtacttgtatacttacatatgttatagcatacgcaattacaaatacataagcagtttgtttatgtgctactctagatttatgttgttttcatatttgtctttcagaaatttcttttatatgcaccaagaagaaaaggctatcctgattggtggagcacctattttttattttttaaaaaaagagttacccgatccctatgtaactaaaaaagaaattgaatcccttatgtgctatcaagttgaaagttaattatgttaggctattgtcatcagctcaattatgcactacgataagtctaaatcttatcatgattttgacaaaaaaaaatgctacccctataaagtacatgtcattttcttgtttcttccttttcccacgtccttcccattctctcttgatcactagataatataggtcactcgtcctttgctctcacaatcacttctcttttatctatgatatttagtgccccaactcttagagcatcaaattcgtcacctctatttggcatcttttcacaaacgaggacactattatacattgctggcaacaattggtaaaaagcttgtgagttgcaatgggtatgcagaacgagagtcttgggcaagccaaggcaacttcgatgacaatgttggtgtttgacatcattttagtaagttaatttacttgtgtaagcaatgtgtatcatgaagccaatacttacaggacaaaagaggatggccgtaactatgacaaccaatagaatgagaggaggggtgtgtgattcatatttggaggtgagaaaataaatgggaggtatatattgagatggcgatactaccgcaagcgatacaaatattagcgagaggagggaaggaagtgattggccagacatacaagactaagggtgtgttctttaccttcttttcccacttcttttctctcgttttccccacacacacttctgaaattgctaaacggtgcattctttgaaaaaaattatatagggaagttacttttaaaaaaaaatattaatctattttaaagtttattttagctaatacttaattaatcttgtggtagtggattgctctgttttatgcgtggggaggtgaagttcctaacacttccacctccaaatatggcctaatgtgtattgtaggtagctatatggatcatcttagcatgtcaagaaaaaaagggcaaagggatatttttgttatcccacttatcaatgtcctcttgttaccacgaatggaaataatataggtcttggaatggctcaatgatataaaagaaactctccttttttaaaaaaagaaatttctatattatcagctatagtgtcaatggccattatacaaaataccattttgtataccattttcccgcctaaagtgatctaattgatgggccagtctactcaaagcaatttagtttcataactctttcttctaaatacatgttcaatatatatctagaaatagtcaaagctcttttataaatatactcgggcctatatggttgttgcctaatattatcacaactcaacttgtcataagtgtgaccaacaatttgttagccacaagtataacaatatttggctagaaaaataagtgtatgacatgcaagctcatggaggaaagtgtggcttgccacaattaaaacaaacaaacaaacaaacactaagctaataaaccgtgacatgcctaacatgtgatgtggtaatatgtggcattcaactaaacaacacaacttcctaatttatattttctcgttttccacacgtgcacttcccaaactactaaatggtacattttcttaaaagctttctatagaaaagttgctttaaagaatcatacataatccatttttcaagtttaagtagtcatgtgctaatccgtcgttccgttttatgtataggagagaaagggttcccaaccctcaacgttgaatgcaacctaagtaattgatttagatttctaccagaaggaggcactttatgtagtaaagagttttttatatattaaagagaattttactttaaatttgtagttggccatgtgtttggtcataaataattttaacactattaaatttattttcctaccttttttaaaatcagcagatagctgttcaaaaatttgatttgaatattgaaaataatatcgcatgccatttcatgtgttttttgaattaaattaattcccgtaaaatttgtttaacatggtttaggctagccttggaataaaaactcaaaaagtactgtaatttgtaatctgaatcttagcgcttaactctcgagggactccataccaattttttctctagtattgcaagtcatcaattgaaacatgtaagtcacactaactcttgtgacaaaccaattaactagagaaagataactccttattttgatatccttcagaaataacactccttcttgtaacgttttctcatttttcacaattgtttttgactcggagaaaatgacacatggttggttatttttgcaaaaatcgaatcttgaatagaccctcgcccacctgacgcctagttttgtttttttttaaaaaaatactcgtagtttcacgaaatatagtaagaagaagataatttcacttctatgggtagcgctataaatgtgaaaagtagaggggtgttttcgcaaaacagcatgccctagaaaaaaactcttgccttttcccgtcaccctcttctcttccacgagcgccatccccactgtacgtgattgttaacagtgaaatttggtaagcccggagtagtcattggcttagagtcagcatcggcttcgaagtcctgagattagccgatgagagttgtcaagtcgtcagttgtcggattcttgctatattcggttaaggaaattgatctactaaaaaagcttatccaaaagagaccgagttcaaagagaatgcggcatggcaagttatctattaattagaaatagtttgttagtttctttttatctttaggaaagtttatttcttgtccgataaggacttgtatcaacccataggtatataaatatgtacacccagggtctatgtaatctgtcgctacgatcaatacaattcggcgcatcgccaccctttttacttccacttttgtttttatgatccggcggaacttggcacccgacgcggggctgcatcgtcttcgatctccggtgaagggataaatccaatgttccgccggtccaggcaattgtatcgtctatgtcggcgttgttcaaggttgcatcaggacattcgacctattggattactctggtttggataatatatttgcctggctatttatcatatgtctatgttaatctagtcctagcatctcaatttagctctatcggttgtctctcgctttagggtttctgccggtatcggctaaatcgccttgctagattagattagcctaggcatctagcaccctgaaaatcagtcatcggcttaattgtctagatattatgctttttttcatactttgtgctgcatcagttaagtttgatctactaagtcgtgcttagaaccataatctctagcctacttcttgattgccaataaaggtttcatcggggtttcagccggtgagttatctggacgttgcatcggctcataaggattgcatatacatataagttggatttagccaatgacaacaaatgtttcactgtttaatctaatcttgtggattgacatcggacctccagccgatgtgtgctttaaccttcggatcgatgcttatttatcatatattatttgccgattggtttatactggattatattgttattttattatatcatcattagccgattgctttttatatcattatctacatgggacatatagccgattgcttaaatcccatcgctatcggctggtattggtatcggcatcagctattatcggctatcggctggaactactccatcggcttgtcagccgatcggctgttttgatctactatttgcatatcttgtcagttgcaggatcaaactgactggcatgcccacatctcaccaaaatttggacttgcactggagctaagcagatctcccaggccggtgtgttcgattttttcgtcaacagtgattgtgcctcgcgccggctctggtgccaccctccttccacatttgttgcgttgttgtcactctttctccgcccagatcccctcttccctatcaaacacgccctccatctccttccccgatccctatccccaacccctaggtgaggcagcaagaaacccataatcacacacccctaggtgagggctatcatatctgttacgaccacgacaatgacagctaagagctgcagcaatcagatataccgctgcttgcaaccgtaagtatgtaacatgtgagcaacccttaaatttacaagctataatattatctaataataacatggcacgccatttttcatatcaccacaaaagagttctttcattgccttaaattgttctttattgaaaaacatttttcctactactgtaactcttcccatctttctttctcgtaataaacgtggagaggagtaatggatgacgaggttgacgctaagagctggtacaattgtagactataagccagctataaacacatatcgaggagattaaagtagagagagatgagcagcaggctacagatttgtagccagctgtagcacggactataagacgtaatgtgtgtatgacaggtgtgatcagatattagaactcttatatatttgtaggttactattgtatgaattggttattgaatcaactatagatgatttgaagctaatagttggttatactattaaactgagatttgctccgatccaaaaaaatacctcgaggtaacggtacctcacggtaccaaattattttcgatcattggatctaacaatgcccatcctgctcagctagatcaaacgatcggaaacaatttggtaccgtaaggtaccggtacatcgaggtactttttgatggaccggagcaaatctctattaaacttgctctaattttataactatctattttattatctgcttgctctaattgctgcagcttctcccagaattagaagctcccccaaacagttcaacttttggtccagattctgagaagctgtagttataaaatccagaaaatgaactgggaaccagaagttggaaaacccaggttttccagaaaatgaatttgaagtcagaagttgagaaacccatctcctccgattatcagcttctgagaatcttaacctccttaacctccccagacaggcctttagcaaacccgtctctatcttcaaaacctgatcccaaccctatcttcgaaacctgatcccagtcccagccctgatattagaggaaagaaacacgttgtttccaaactggaacccggaagaacaaccataaataagcaaatcaataatcccttcccttggtcccctgtctctctacccaagtactcagtcggcgcaacgcaacacagtcagagtgatcgccagtggggaaggctaccagcagcaatccaatctaatccacctccactcccccgccgccgccgcacctggactgcccggatccgccgccgccgcctcctctggggttgattgatggccacgccgttccacagcccgccctgcccaacagccgagcttctcctccaccgtctctagaagcttcaccccccccccccccccacgtcgccgcttcccaaaccctagcgtagcgcctcgtcgagggtgagaaggagggtgggcatggataggatcgtcggggctaagtacaagctgggccgcaagatcgggagcggctccttcggggagatctacctcggttcgatctctctctctctctcttaccccctatccctcctcctcctcctgcttttcccccttcttcgattcggttctcggatctgatgtggtttttgctttcttcctcttctctgcagccacgcacgtcgacacgtacgagatagtcgccgtcaagattgtaagctctcttcctcctccaactctcatgttagattttgcttcagtatttgtttgttgcggaaattaggttttgggctgattgcatcgttctgatagctttaactcgcagtgtgccgtgcatgtgtgttctataaaaccctgaataaaatgttaggttacaacttaattcgctgttgatgtcggtgagttagaattgtgcagtaatcctttctgtttggaaatcactggtttatgctgaaatggtatacattttttgtgggagcgaaactgcatggcctgtagtcagtgccggagccaggattaggacaggaaaagagaatatgtgtgtgtcggtgggtgcggcgcaaataacaatggcaatagaacatgaaatggtaactagcagctaaagaatgtcccgctctctgtgactctgaacgcattgccacgaagtagtagatgcagtctgcaatggtggatgtgttcaaatttgcccgcgaatagtgaatgtatctcccaatgaggaatgctattatgctttgtttcgacgagagatgctaaagctaatattcaactaatgatcccatgtttgtaagctactgctgtatttatgttttttctgtagtcatttatggtttactgtagcttcaaaccaagcagtggcaataaaccatatgcttacattaatcacataattaggcactaggtgcccaagaaaataaaatttcttgaggggatgtgccattgctctagttcagcccctgcctgtagctacaaaaatttcaagtggatatcatggaacagagtatggtttcctacacaactgtgctatgtgcccattagtatgggctcatcgaagaaaagtcaaaacggtgcatgatagtaggtctcaatttatcttttgcacctactatccactttcacttgtgtgtgtctgtttctagattgtgagtagctagatgtttggtatgctgctgtgaagtatgcgagttctgaggaggagcgctttgcgttataggaggaaactattgtgcctcatttggttcttaaacagatttgtgaacacctatttggtgtcttagttgtatttgacacaaagaattgaaaacattctttatattttgaaattcgaattcaattcaaatgctaattttcaatatttattttatctaaaatttatttttaaaagggaaaaatgctttactttgtctttctaacacatgtaattttatcctagttgaagatgctagacgtttagcattctatccttgcattggaaatttcttcttaagatgttcaatttcactactgactattccaagaaataataagtgaaataaaacttttaaagatctcattttgtttggttttggattgaacttgttgtgaaagtcttgtaaacagtgttttattgtatattatgctttagtgatgtaccttttctgctttaagtttctctcttttcttattttcatataatatatttacattgtatcgaattagatggtaattcgcatatttatgtactaataaggtctctgatatatcttcaatatgatatagtttctttgccatgtcactgcaacaaccatgatttaagaggacatttgaactgtttatccattttattgtgctgatgtatactgcaactggttatattcaggaaagcagcaaaacaaatcatccccagttgctttatgaggccaagctgtataatgctcttcagggagggagtatgtgtttggtctttaaatggttctattttctcaattttttgtaccagagctaacccaaatccttcatacctgtgaattcatgtagctggaattgcaaacataaaatggtgtggcatcgatggtgaggacaatgtgcttgttattgatttgctggggccaagccttgaggatctatttgtttattgtggtcgaagattctcgctaaagacggtcttgatgttagcggatcagatggtaatgatagaattggcttcaatctttcgttgttctgtttgcaaatggagatgtaactatggaagctaatgtctcttttgtgaaaaatatggctattgcttgttgatactacttttagttaacacactataggcactagagcatttttttagaaactagcaccaaaggtgatagaggggttttagaacattttttttaattctactgttaataacataacttcacgtacacgatatacctgtaccaggattccatattgcttgcaacatacctttttttcttgaattttgtaacacaaatttaattatctggtagtttttctttgatggtttgttctatttcttgcactcttatcagcaaattcaaaatttgcctgaaacttttttgctggataattttgtatactgatttctatggacttacctatacaacctgcagaaccatgttttttcttttcctttaccgatccattaattgatttctcatttaatcatgaagataacaagagtagaattcatgcattccaagggatatttgcacagagatatcaagcctgataacttcctcatgggccttggtcgtaaagctaaccaggtgtgtaacaagtggctgtttgtacatatatgtagtgattatgcgctgtaattgttttgccatccaactctcaggtctacattattgactttgggcttgcaaagaggtaccgtgacgcaactactaatcgccacataccttataggtgagcaagtagttaaccccacatttcttttttcttttgttatttttcgctatacattaatttaatcttctactttctggtgtaacatgtgttgtgtgagtgtcattgacccacttgccatttttacagggaaaataaaaacttgaccggcacagctcgatatgcaagttgcaacactcatcttggcattggtgagaaatataacaattctatttatgtgatgtcataagtcataactttagatgctgtaatcatgaatcgtaataattgtactgtttgattatttgtcctgaaattccacttaaataaagcgaagttattattttattactttccttttacatcaattactaaacttagttttgctatcccttgccagagcaaagccgaagagatgatttggaatccattggttatgttcttctgtattttctcaggggaaggtagtattcttcagtgttaataagctattcagagtatatttttccttctcgttgtggcagaataatttatgattgtaagataatatctgtaactgcagcatgaccattgttaacaaaaaagtagttatatcctcttaacattaataagccagctagatttagtcttgaatttgccatgtgctattgtgcttgtattatccatagatttttgtttctctctctaaactagccatacattttgtccagtcttccttggcagggtttaaaagctgccacaaagaagcagaaatacgataaaataagtgagaaaaagctcgcaacacccatcgaggttgtttaagtttgcatgctttaatttatgtgaattattcacacctttttgtatcattgatgtgattgcttatggagtttttggtgcaggttttatgtaaatcccatcctgttgaatttgcttcttattttcattattgccattcattgacattcgatcaacggccggattatggatttttgagaaggctctttagagatttggctgaccgtgaaggtatagcatcagaaacactagtggtacatctcccattatcttatgttacatgaacttaatatcttgttcaataatttggccaccaggttatcagtatgatcatgtttttgattggacactgttgaagtgcaaacaatcccaaaaagcaaaggctcaacaagtatgtttcagtgattgcgatcttgcttcttttcacataatcgtgatcgttcttattttttaattcttttttgaatttgaacaattgtcagaaatttatgcattttaaaataggttgatgtgcttaatggaatgtctgtgatttctcccagattgatttttcacttataatcagtttctatttgtgatctctatcttagcaccttttctgatttatctcaatctcttcattgacagcaagatccaggtgtaagtagccgggcggttccaacgaatattgagaagcaccaaggtagcagattgcacaaaattcttagtatcaatagatgcatggtattcctttaatactgtggcttttgtaacttagtcatggttgtcacctgattactttcagttagtgtgtcacgcccaacagaagcttctggtcagcttgaatcagagcaacgcccagcgattagaatgcaattcaaatctactgctgaaaacagtcgttcaagtaatcggcatactgacaaattggtaagttcttcctattatttgatgaggaaattttcctaactaaaataatgttcgacttaatttgttgtaaataaatttgcatgctaatgaatttcagagtgttattaagatcttacaggctcccattttttttaacctgatatgaatagaactttacacatgaatgttaaggtgccctttgtttggttatatatcttgtatttctctgcagagagttggtactagcactgaaaatgtcttgctgcaatccacatcatttggccatgctgatgctccaaggaggaatatagcaatctcaaaaactcagggcctcgttgattccaatgctcatggaacgaacaatccagggccttctaatcacctttagcatctgtatcagttcatgagagcatattggtccatgcagaccaccattggtgagacttctttcaattctatgatgtccttgcaacttctttatgtagatattatggacaattgtgtggtgcttttgggtaattttcttctgcttgaccttacggaatctttgctttccctacaaaataagtgtgtagagatggtatggttgtatcctggtaaccaaaggcatgcatgattagagttggaatccaccatgttgtcgctgtcattgctagaccctcttatgagttgtgagctagttttcaaagtgtgagggagaagataatgtgttgctgtgacaaattctccttgaacacactttcttgattgtttaaacaatgcaggtggtatcagaagcaaagtttgtggaagcctagaaaaaaattaggtggaagaaatgggaaatacatgtatacctagttgtatgttggctctaggcatgcgccttatttgacaataataatagttcaggcgtttaaaaatgtaagtggtcaccttttaagagataccgtttggtccgtatggtatttagcggccattacattttcagtgtctctgtaacctattttggtgatgccaatatggccactcttacctatgtttctcatgcattgcctagtgaccttttttgctgctatacttgtaggtcactgtatatgacttcgggagagaatccagagcaaagctgtatgccctcaaatgttttggtgcatgaagccgttgccaaaaattgctgtcaggcttttaaggtgtcctctgtattgattgaggtgattactacctaacagaaacagtggttaggtgtgctgttagcctgttactgttcagcatcttttagcgtgcagtggtcaagaagttcacttttccatattatgtggataatatatggaagcttaggaatgtcagtaccctcttttgtgttctacatgtgtgaatgcattgtaacgttttacctgggctcatttattcagggttctttgccaattaaaattttaacgatgctataatgattgctaaaagagatcttggaggctcattggaacagctttagccataattagggatcagcgccagcgcgataatggaacttacactcatcatctaattgtgggatctccatctgactttcagttgtaagttgaatggagatggatgctatttgttctattgtactattaagtaactgcaatagaatttctcactgaaatgttttctccctcaccagatgtcagtttgctgctgtcaatccaccagccaaaaattgagatcttattcagcttggatgggcttgcagtctctaatgagtttggcatcatatccaacctatcaaagattatgaggagctttctccgaagtatttatgatttggttagcatggcatactttattttcatcttgacttgtcaacatcaatatgcctaagcaaatggtttgcttcctgtgaaaaatggcagagcaaattcagggccatttggactttcaagtgcaactctactgtggcttatgatgcagatcactctttgaatctatgagagcaagaaacctggtggttttgtttcacagaggtaaattggttatcatttgtgccatgtgagctgttgacacttggcgaacatggcttggctggtttgtgttctgctagatgatttctactctgatgtgtaattgaagagctctcgtgtcataatttgtatagaatcaatatttcattattctaatatttataaagacatccaaatgaaagcggggtttttggcatggagcttcaacttgtttgagttaaaaggaatgaaatcgattgcttataccattctgaagaaatcagaccttcagctaccctattgtgctttatctatttgttgatatcgcaaaaggttcatttgaatgtactgtgcaccatacgtttgatggtttgagttgctcgggcattacttctggccttctgggtgtaaagccaaattacttatgtgtgttcatgtaatttggtgttatgctcaatccttcagggattttaagttgtcataacctcgtggtaagcggagtatctgtttcattcttggatttggaattcatcaacttgttcattgctttgaacagtttatttccagattaagcttcaaagttggaacagatcaggtagctaggtcctgttatctattcatctaagctatgttttgtactcttcccggtcgtcacggggacgaaacctcatgctctgttatttattcagacaccaaaatttcttggtcatggagttcgagctcatttacagtgattgcaaccaagcaagatttatctctggtcactagtcattcaacaaacagaactggcacccggtttctgaacaggtttactccagttcctttgcaaagtcgatgttgtcgacaaacacctgccatgacaagaggaagagtgagcaaatgtttctactgatgaccagcagaagaaagcactttgaaatatttggctgatcgaagcatatgatccgataccgatttccagccatcagggtccaggatggacgtgatcttggtgttgatccccggcaatggccctggctcccgcaccacctgccctccgaacagcttcaccacctccgccgtcttgtagacgtcgtcggttccgatcgcgatctgcgtgagcatggcgcgatcgcgacgtcatgccagttcagctctagaaaccattgatggatgaatggaataaaggagatccatgatagatggatccatccatggtgttcacctgggcatatgcattccccttgtcatattcagtgacaccatagttgtatgtcagctccagcacagcattcttgtcttcaggaccataccccatcattgccactgtgtactacacaagcacttgaaaatgtcaccacattgtacatgaatggtccccaaatgaagttattttttctgcagattgatcaccttgtattcagggttatctctcttccttagcagctccatgccacaggcctgcaagatggatcatccaatccaatgcaatgagaatcatcaaggcaggataagctctgaaattgcgcgggttcttatttcttttcggtttcggattcgaaccttctcatagaagcttatggcccgatcaagattaccgacacggagcatcacctggcacaggggctctggagtccctggcctctcaaggatctcaaacttgtagccatctgggtcctcgacgaaggcgatcaccgtcttgccgcccttgacagggccgggctccctggtcaccttccctcctttcgcccttatcagctccaccgtcttcgccacctgccatgatcaattccaagaaccccaaacacaattgagccaaactttcaaccaaccatcagaccaagcaagtaatgatcaatcacacttgcgatcgattgcaattgtcgaaagctgaaattacatcgtcgacggcgatgccaaagtgaccgaaacctgccccgatgtcatacttgtcgacgccatagtctgcgccatatgcgagaggtgagaccaaaggaggaggaggaggaacatatcagtcatatgagagaatgaacaatgtgcaatgcaaaattatgcaatgggaggagtggagtagcggttttaactgtaggtgagctcgacgacgaagtggttgtcctccgcgccatagccgaggaaggcgttggtgtacttctcctccgggatgtcgcgcttcctcagcagcttcatcccaaggcactccgtgtagaacctatgcagcagcagcagcagaagatcaatcaattgaggaaaaatgtcagattatgtgtttgattttcacttctcagtaagagattgtatccgtgaaggtgatgaggtttgtctacttgattgttctgtcgatgtcgccgacgcggtagacgacgtggagcagccgccggttgtcgctcttggcccaggcgaaggcctcctccttgctgccgaaggccgccgccgcctgcgcggcgtccggcggcgaggcccggagcttgggcgcggcgctcgcgccccgggtcagcctcaccggctccggctgcagcgctgcagtccatccaagaagacgtacagctgaccgatcgaaccgactgaatttgcttggagaggaggaatcagccgggggtcgacaggggggctcacctgcggcggcggtggagaggagcagcgacctccgcgggacggccggcgaggcgcaggcggcgacggcggcggcgcggccggcggccatggggagagctctcattgtgcggtgcggtgcgggcggtgaagctttggtcggggcggttggttggtgttgccgctgatgctatccttaattcctggctgctttgctccttcctttcgcgccacatttccttttttttttcccgcgttttagatgtaaccgttgagaaacaggtggcacatcaacatattcacgttccctgtgcagctatggttttggagcaccaccaacagagtacgtgtcttaaatcctctaactgaatgactttagcgtcaccgatatgcaggtttatagtaaagtgaatttatatatgtcagtgatgacttaaatggaagaattagcgtccctctcgatggattgtggaaaccatgaaaggtttgatgaaaaatttgccacctccgccaaaaatcatcccaaatgtgatacaaacaccaataatggcggagcaggtggctgtttaactaatagggcttgagtgcttgacaacgatcaaacaatcaattgttaaggacattgacagacttgtagtggtggcagcaaccacagagccctagcagtttcccaaccaggcaatctctgcctctgtcgattatagaaatcggtaataataaaatagttaacacacgagacctaaacctaaagtatatggatatgcatagggacaagaatttagacaaattcaggttgagaggtaataccctactcctatttgataattatatccatcgggtgtagtattgatctgactatctgactgtgacatatctcgccatctatggctatgcccttagattcttatttgagaattatatctgtcgggtgtagtattcatctgatgatctgttgtggtttatctcgccatctatcgttatgtccttagattgctccctgctcaccttatataggttgggggtagggttacaaagagaaaacctaatcggacatggcattagttttctagtctattatatggtagtacctggttgggaaaataggtaccgccatcgaatacaaggcaaaattgtgaccgagtcatactttggccttctttagatctaaaaaaaattttggccaaaaacgtcacatcaaatgtttggacacatacatgaggcattaaatgtgggaaaaaaaccaattgtacagtttgcatataaattgcgagacgaatctttgagcctagttacgtcatgatttgacaatatgatgctacagtaaatatttgctaattacagattaattaggcttaataaattcgtctcacaatttacatgcagagtctgtaatttgttttgttattagtctacgtttaatacttcaaatgtgtatccatatactttaaaaactttacaccaaataactaaacacaccctctattacatagggtgtgtttagttcacgttaaaattggaagtttggttgaaattggaacgatgctacggaaaagttggaagtttgtgtgtgtagaaaagttttgatgtgatggaaaagttgaaagtttaaagaaaaaatttggaactaaactcagccataatatatagatccggctcacctcctatctctagttaaatatggaggctgtagttaaatatgaaggctgtgtgtgtaccggtaccaactttctccacatccatgttaggaacccactacttccaactcaacaacaagcatccaccatagaagcaacacctgttttggggacaagagaagaagaagctatggaatacaagtgctggaaacttctagaaccgaggggggaaggctagagatcggaggagaggtaggggagagagatcgacgagggtgcccaccggctgcccaagtcgccgccgccgccgggagcttcagctccgccaagttcaaatgatctttcgatgccccctggtgttgccgacggtgctgcttgtatgctgctcccttccgtttgcttgggcctcatggcaataggctgaccagcccgtgtgcggcccacccgggatcctgacaatcccctcttcttgaaattcggcttgtccccaagccgatggaatacacctcccggatcccatggttgctccaaatatttggtgttagacaataaaccatcattgaagaagaatagagcaagtagctttagcttgaataacttcttactccatgtaaagtactcctgggtgatgcatgacaatggcactattacgaattgcttgccaacattgattcccaacaatttgatatgttgcaaacagtgacaacctcgcttgatcaacaccactgtaggaactaacccaaaagtatacttctcatcatgaattgaattagtgtctacttccattcctttcatccttttgcaacctttttcttcagcaatcacatataggaaatctctttcaacattcaaaccaatgtaatttgattccaaacatgattcagattctgatatcaccatgcaaattattctcatattccatttctccactatagttgggtagtagttgagcaacatcccccagagatcaatagatgataaccaaacagataatgattcaggatcagaaataactagattgctttccttgctagcaagtgatgtcaaactgacctggaaaatcaaagcccaaaactggtgcattttctgctcaaagcaagtggaagtttcaatagtcatcattttcttttgctcattccaaggaattatacttgcagcaaaatcagtagtgcaacccttccctactctagcttccagcaaaccaactaatggcagccaaggtggcatccattgcaatctggtcctaaaatagctggggattggcaaggctagatatggattccaacattcctatgtcccttcctcataactagtgtcaataattctactactccttgtcctcttctcatcccatgcaattatactcaaagcagtgacataattgcaacatttcctgctactagtttggaaaggcaaaattctgaaacttgcttcatgtggtggaggccagggctccaactcaaccatttcatttgataaaaccaccctttgaagtataagagctccaatacaaaaatgcacccatgccaaagaacttactagacttggtggaggccagggtgggacgaaatagaatctcatccaatgatgattaattgcagtccaggtcatataccacttcttccatcctgaccaggcaggtggccatgggtttttcttggggtgttccatcagtggcttattgtcactctcagtacatttcatcgaacacttcataggcacctgatctcccacacagatggcatcaccaagcttcagccctgtgggtggagacggttctaccaatgatgtcatgaactccatagggctagcataagcgggaacgcaagcacaacttgttaagtgccccgtttgatgccggagctagacatcaaacacttagcatgcgtcaccttggggtggtcaagattgttgatgtcagtggcaccgattgcgttcctagcggctaccaactccatagaggctgcggcagtggtggcggacgtaaccactacagccacagtgagatcgggctcgatggtaggaccggagcatttcgtcgaacacatggtgggcgtgacttcgggtgagtccttggtgacgatgcagggggcgtggcccttgtccttgttgtctcctagctcccaggtagctgttggagcagtatcctcaccaatgtgacttgaactcgccgttgcccaagtgaagttgttgttggggcattctgtcaaacacttggtaggcactggagtaggtggtgccataggtgctgtaggtgatgtagccttgagaacagtggtggttgccctgatggctgcaattatttcctcggaagccttgctcctacgaacctctatctcttccaacttttgaaatatccgattgatcttctcctcttgcatgcgcttggcctccatttgttcaaacttctccaatatccgatctagaactttgtccagccatttctcctctttgttcatggtagaattgatggggacaggcttagatgtcctctgatcttccttgggcatctcagattggctaggcattccatcgaacaggttatgggcgttggtgtcatgagcaccacccttgcccaaatccaacaaccacttgcatggggcgttgctgcagtactctcccatcaactccatgctagaaatcccacgaatcgacagctctgataccagattgttaggaacccactactttcaactcaacaacaagcatccaccatagaagcaacagctgttttggggacaagagaagaagaagctatggaatacaagtgctggaaacttctagaaccgaggggggaaggctggagatcggaggagaggtaggggagagagatcgacgagggtgcccaccggccgcccaagtcgccgccgccgggagcttcagctccgccaagtccaaatgatctttcgatgccagttgttgccgacgctgctgcttgtatgctgctcccttccgtttgcttgggcctcatggcgatgggctgaccagcccgtgtgcggcccacccgagatcctgacaatccactaagcaccaacgaaaataatattactaaaaaataaatttgacattaaaaagttatgcataatgaaattaaattcaggctaatctggatatacatgcatgtcatttcatatgcttatctaatataaaagtagtgaaaaaagtaaactttctagcaaagtttcaacggccgcatcgtcgaaaatacatggcatgtccgatttccgcttggagacgagcatgaccaatagaatgtgaataattcattccaaaattttgttattgggtttgttttctaaattaggaatagaaaatgaaaaaaaaattatctattcaagaaaaagcctaaatttaatttctaaaaactaaaagtgcaacattttattaaactaccaaccgaaatatttccttttccaccgtgcccgcgcgaaaaatgatcgctcctccacccaccccatgcgcggtaaggaaaaaaactcgtgggaaagagagattggcaacgggagatgcggcatcgctccccctcaaataaacagagctatgaatgcgggtttccaaaatattaggatcaagataggatagccattcgatcctttgcttggagccttggagtaagggcatccacaatgtacttcaaatccagtccatagtcaataaaataatacattcaattacctaaccatattgtgagtagtgtataggagagaaatagcaaaactcatccataagcatatagattgcccatatagaataaaatatgtcatttgtctctatttcctctctcctcctactaatacttactacctactccctccgttccatgaaaaaccaacctaatactggatgtgacatattcaagtacaatgaatctggacaaatgtatgtctagatttatagtactaggatatgtcacatcatttgttttttcgggacggagggagtatatacattatgaatgttgtaatagttaaaatccacaaatatggatcccatctttatggactcctttagctatagctatatagtacattggtgatttggtgttgccctaaccacccccgagtctaagtccttggagaaacttctttttatggataagtccttgtacgtccctacggtaaatgaaatcgcgatttccccctcgtccggcagctcacgccgcctccgctagctccccaagtcgaaacgtcgtcgcccctcatcatctcctcctcgttgtcgcacccccaaccgcacgctgccgccgctcgcttcctcctctcctcgtctcactccagaaagccaagctgcaaagcactatggcacatcccatagcaatggcagcatggacacacagccatcggagccgaccgtggtaaaagctttcatcgcggtgcctgatatatcgacgccgacatcgagcacgccccaactccatgtgagttcaccccatctttccttctacttgctaatccagtgtttggtcttggatgtcagtctgatagttctgctcctgctatgagattgatgaatttgtttgttgcttcacctgtccgttctcccaaaacatgttgaactcggtgctgctcgaataaaacttgtagtgttgatttgattccttagtttagggatagctataagggtcaccaccattgacatggtaaattgtaggtcccaaacgacattacattttagttgtgcagggagttatataaacttcgaaataattcattctaatattcagtgaaaaggtttagggtgagaaatactgcaagttttattttagactaaaagagtctaaaataacaatactctctgcatatctccttgaaaagggggctactgcaacgaagaagtattatggaaccataatggtttgttttactcagttgtttgagtaattgagtttaatttccataaacatccactattatgatgtaaaatatttgaagaccggacaggtgaagatgatctttaccagtagaagccaatagaagacttattcagtttggccttggtaaaatctgaaacctgaaaacttaatgttctgttttcatatatgcagatccaacaaatgcttagttattactccgtatggtggaattccatcgcttatcagcctggtaaagaatactgttattaattttctaaaactaagagcaatgccataacttattctctatccacttatgataggaggttttattcttatgaaattgtttatttcattattgattcctcaattttctgtagttttttctatgcgtgctaactcagcaagctcttttatgggcctaattgctcaaagacagattcttttttactctagattgaattaaattatgtacataacaagttgaaatcagatgtgcatatttaatggctcagttctgccgaccaataataacataatatttaaacatttagttcggatcataggttcgtctcgatatctaattctagctgactgactatcaatttatgtatttttgaaaaaaaaatcaaatttaaagtataatccaattataatatattatggcccatatatacacaaggctcttatacgggcatcacaaagtcgcgcaacgcgcggctaggtggctagttatactagttgaaatatctaggagataagagaaggcaagcaatggaatttgtttttcccattcaggcattcagccccgtttggaactcaattccacaatgttactagctcacttccacaatgtcaaactgcttgaaataccagtccctttcttctgcccaattccacaatgttaaatagtttgaatacctttagtttaatttcaaaaaaggaatttgaagattccctttcttgtgctcaattccacgatgtcaaacagtttgaatacctatccctttcttcagctcaatctgaatctttttatcttatctataacgagtcattttttttcaccatgtacatcgtacatcatttcttctactgttgaatagtagctgagaagcagtgtccattctcattatgcttgaattttcaatccattttcatccaagtatccaattcaagatgtatttgcaggctatagatgagctgaaagatctcctttcttttcaagcaagaacaaagttaagcaagggaagatccaagaacaagaacaccaatggctgacgagtcatggagggcgccggcgatagtgcaagagctggcggcagccggcgtcgaggagccgccgagccgatacctgctacgggagaaagaccgttctgacgtcaagctggtcgccgccgagctgccggagcccctccccgtcgttgatctcagccggctagatggtgccgaggaggccaccaagctcagggtggctctgcagaattggggcttcttcctggtcagcttctaacaagtgattctactttgcttcataaaaaagacttgctcatttgtattcatttctccaatttgtgtggttgtgtgtgatccagcttaccaaccatggagtagaagcctctctgatggacagcgtgatgaacttgtcgagagagtttttcaaccaaccaatcgaacggaagcaaaaattcagcaacttgatcgatggcaagaacttccagattcaagggtatggaactgaccgggtggttacccaagatcagatcctggactggtctgatcggttgcatctcagagttgaacccaaggaggagcaagatcttgccttctggcctgaccatcctgaatctttcaggtcacctactcacctcacattgattgatgctttactttccagtttccacacgtctgaatttctttctcttttgttttttcttttttttgcaaaagatagtgtttcttactgttcatatattacttacaaagtaacaaggattgttgtctgaattcagaaagtacaacttgacgatgtatcaagaaatggttttgctgagctatttgagagccttttcttctgcagggatgttctgaacaagtatgcatcaggaaccaaaagaattagagacgatatcattcaggctatggccaagcttcttgagcttgatgaggattacttcttggaccgactcaacgaagctcctgcatttgcaagattcaactactaccctccctgtccaaggcctgaccttgtgttcggcatcaggcctcactccgacggcaccctcttgacgattcttctcgtcgacaaagatgtcagtggcctgcaagttcagagggatggcaagtggtccaacgttgaggcaactcctcacacattgctgatcaacttaggtgacaccatggaggtaattgccttattggcatccaacatccaaaatacttactctctgaatctgcagacatccagtacttcctccgtttcatattataagactttctagcattgcccacattcatatatatgttaatgaatctagacacatatatgtctagattcattaatatatatataaatgttgttaatgaatctagacatatatgtgtctagattcattaacatatatatgaatgtgggcaatgctagaaagtcttatgacctgaaacgaaggtagtatatctgatgataaatccagggtttctgaatgctgatgcatatttggatgcaacatttctgtgcaggtaatgtgcaatggcatcttcaggagcccggtgcacagggtggtgacaaacgccgagaaggagaggatctccctggccatgttatacagcgtgaacgatgagaaagacattgagccggcggctggtttgctggatgagaatcggcctgcaagatacaggaaagtgagcgtcgaagagttcagggccgggatctttggaaaattctctcgaggagagaggtacatcgactccctgaggatctgatctcgaagagagcatgattgttgcaagctcagcagctttcagtagcaagtatttccttgggaaaacaaacatttttccccccttaagggaattgctgaaaacatgtcgcaagttctcgtaaagaaaaacttttaaatttaactatggtataattgtaatataattacatatgtaataacccctccgtttcatattataagactttctagcattgtccacatttatatagatgtgggcaatgccataaagtcttacaatatgaaaacggaggaagtcttgtaactacggtactgcattcttttcaaattacaaattacttgtcatcctagctagcattcaaaatttatatcaaaatatttatcgttctcacgtttcaaggcactttcctaccctttatcagcgtagccatactagtaatacatggtgatagtaagtagtaactttatatcatgacatccaacatatattaaattgttcaagtatgatgaaacttaattaatgtacgcaattaacacaatctaccaaaacagttttgtcattatttaattattatgctaagaaaataaatttcacataatccacctcgctgaaaaaaaaaatcatatagctctataaaaaaaccatataaccctataaaaaaggaaaaaaaatcatataaccctagacatgtggcatgaataacacaaaaccctcacctctgggtttgttccaataataaattcctaaggttttttcagatacaatccgtggtacaatataactgttccattaactccatcatatgaagctagttagtggcccttcttttcaacccaccttcctctccccattagcccttattatcaaacttgcacatcgataatttgagctctcagctctcttgcagtattgaggtaaccagtcaaaaattacaagataacaatacttgcaatgccattggctcattgctgataacaaaaattgacataaaggaattagaaaataaaacagaaatttagtgtgccaacactgatcaacataacttggagccctttccaccacatagttgtccgtgtttagctctaaactcgaccataccttttttttaataatggaatttaccggcctttgctttaaacaagctatagtcaattattatagggaaaccaatcaaaagaccgcgagttacaaattcataattttattaaaaacgagaaaactacttagaacaccaccctggagacagagatggccttctatctatggttggtgaggaactatataatcgttgttttttcatcaacttacaagttatatgtagtccttgtattcattgtgccgatcaaatttcgctcacatcaccactagtgaccaatgtcgaaccgaagcgaaacataaaatgagagtatttgagctataaatcagtcgtttgtgatctagatcttgccatcacaacaactattgaaaccaccaaactgatgtatgtagccaacaatggccactcctgcacgaagaaggtcctccaaagcgacacctccatgaaggacacaacgtgagataccattacaactcgtccgagaaatcaaagaaatgtttcacttggatgccagtgcaaagggatggagtgatgtgagatgcatccaaggagaacaacggcacccaaggacaggtgtgactgatcggcgaccagctgcgcactgcgcggggctgcacccgcgcggtcagtcctgcccaccttagtccattagtacagctactactgctacaaatactactactacgttactactactagtaataatactactactactataattatttttatatgtatatattttttatataaaaaatatatacacgtatacaaagtttatatacgacgtatacaaactttatatacgtacatattaaaaattaaaaaaaactagaaaatacatcatgtacgtaaactttgtatacacgtatacaaactttatatccatgtatataaagtttgtatccatacatataaaaaaacaaaaaaaaccaaaaggaaaaaacccaaagagccgaaaaagaaaaccagagaaaacttaataaaaaagagaagaaaaccaaccgggaaaaacccaccacgtgggcttcccacgcgtgaccgctgcccccccctcctccacacgtccatccgctcggggggggggggcacggatattcgccaattagctctttcgcccaaggatatcgatatcgtcgaagccagctagatggcataattgaacacaaaattatgatgaggatttcgccatacatgatggaaaagaaatgtcttcaaacctggggttattgaaacaaacccttcaaacatgcatgagatttgtgttactcatgcctaggttttcccttaccatttggactggggttaccgtatcccaatggtaagtgcatttaactaaacaaattaaccttattgaaattttaaatatttgtttttttaaaaaaatgttatggttggcacgttcttcttattattgtaccacgacagtaagcttggttaacatggtaaccacatggtgagaaaaaccttactcatgcctagaatgaacaaaatattttataaaattgaacacaaaaaggaggttcaatgctagtaccttcttcggctaattaattcagtccaacgcatggtcgcatgcacatttggatcttctcgcatgtgcacctgttgtgactgaggttttctggataatatattcagctcctgatccaaaggtttggtcatttaatttgttatattctcagaagtacatttgccgaatctgaaagcattaattatatgtactgaaaacttccaatatatggctgtcatgaaatctttctcccatgttctcgaatcttaatttattctgtacttctctttcatttttattttttctgcatttttcttcgttcaacgcagccaaccatgtgtgtgcgcaaatctgagctccatcttcgagctagttctggccgtcaagataatctaaaaaataattaagcaatcattcatgcatatatccttatggcgaacgccgggacaaaatgcattattgtacacacatcaagaagatagtgaagtgtcaagctacaaattgattgcacccatttacatcaataatcaattgaccatggactagttttttcacaaaataacacaactaaaacacattccgattacagatgattacagatgtcgcttttccacctaacatcataaatccaaccgatcgagaataccacgcatattctcattttttctttcccattacacgcaagacacataccttcgtatggaaagcgagcattaattcaggcgttccaacaaacaaaaaattaggcaaaactcctttataaatgctaagagtcgattctaagccattgtcatgcataacaaccatactcatttctttttcttccatgtcatcaaatttacttgcatgacaatagagagagactctattgtcatgcaagtaaatttgatgacatcatttattagtggtctctctctattgtcatgcaagtaaatttgatgacatggaagaaagagaaagcttaggacatgtacaacggtctttattagtggtctctctattgtcatgcaagtaaatttgatgatatggaagaaagagaaaggagtatggttgttatgcatgacaacggctcagagtcgactcttagcatttattagagcaaattttgttgcatggtggtgaaagaaaggaaagaagagcaagaaaaagtattttaatacattaatggttagagaccatattgtctctaactgttgtaggatgctaatctctaaataacgtagagctcgtaactgactctacctttgtgcatgccctatatggatcactaatctggtgactctaccgcatatctattctttttagtttacttatcattgctatgaattatttgctccacgtttcttaaactaggaaggtagcccgcgtgatgcgcgggcatgtattataaattatgtttgaaaaagacttaaaatgacataatatcagccagatgacatttgctatttcaaaagtattgtttatccataacttatcctcattagtgttgcttagataatttttttaatctatttgttagcttttaaaatatataatatttaatacattcctataaacaattatctacgatctcttcattatctacaaaggagttagatttaatttgtttggaaacatgtggtgttttgttttgtttaataaaatatttatgtgctttattttttttagcaaatcctaaataattattattgttaatgaatatgttttatttgtactaccaagctagtcctcctagttggttcacattgacacaatttgttgcatatttacatataaatttctaaagatatttcgttgacctccctttcctgatatatgcgtgatctatagtatcttttttttttaaaaaaatgttatggcaatggaacttgtaatagttgttcaaattttagtgaaaagtaggaatcgatgttcctactgatattttccatgtcttgttttattttataccactcttattttaagctcaaaacatatgtgttatgaatctttaaattgttggtttaattatgaatagagcaatttatattagaaataagatgtgtggctaaaaaaatatgtatgttttaatattattgattatttgtccttttaatttgatagctataaaaatatcaaggaggggtagaggggaaagtgcgagccgaggagtgaggggatgggtagtgttgtgtttgtgcgcatgtgaggaggaggacattgttttgggggggggattttttctttcctatttttttttataaatgacttaagtgaaaaccgatgaactttttttcctaaaaattcaaataatttttttctaattattaagatgtaacacctaacggcttaagatttttttttaaaaaagtagatctaatgattgaaaataatggatctacagatttaagttgaaaccggtggtcaaatgtttttttcttataatttctatgattttatttttaaatttaagccataacacatgacattgtaattgctctatagagaatgtatgatgatttaaggtgacatagtaacttttatcatttttttattgttctatttttttttatttggttgacacatataggtgtctacaaatgacgtattaattatttagagtgaaatatgggtaatatggatattgaattatttattcatttataattaagacaatagttgaaacaaacttaaaaaccagatatagcttaagaattataatcatttagctttttaattgatgtttattttttatattaagttcttaattagttaaaaattagaagaagaaagaattggatgagagaggagaggaggagagagtgtgtgtttgtatataattagaatatttattttacaagtttaaaattttttagttactattgctttattgtataaaaatagaataaatgctttattgattgattaatatatatctttcttagttgtcttttcataaatatatttatatgtatacaatagttattaaaagtatgtactctacaaatctaataatattattttgacttattataatgttagaatgagaggagtattttttgggaacattatccagtgttaggttcatttagttttttcatcgtatatctaatttaattattgttaagttatatacggtgataaaatctatatcattaatttttttccataattttataattttttgaattggacacaaaggtcggaaaatataaccaaaagttacaaattgtttttcaaagttgaattattgtgaatgtgggcccttaaatgtacaataatataaagaatgcagtgcgtgcgtaggcatggacttcttgtgattaaaagaacattatttatatgatttacatgtcatagttgcttaaatttttagcataaattttgatttctaacaaatatattttgggaacattacttctgtgttctttgctttaagttcccaactcatccctcttttttttctagtgcgcgcttttcaaattactaaatagtatgttttttgaaaaaaaaaatttctataggaaagttgctttaaaagatcatattaattattttttaaaaaatagctaatattaaattaatcaagtactaatgagttgcttcgttctgcgtgctagagagattaggtcccaaccccatggaatgaacgcagcctagttacgttcattttacttttagaactgtagatcaattaattatcatgaagttatataggatgataatatatattattattgtttttcatatttcttctaattgtttgagatgcatgcaaaagtcagaaaatatagcccaaaagtaacactgcaggtctttaatgaatttggtcgtaaacaatctcgagacattgatggataaaaaaactattatatgatttagatatcgtagttacttaattttttaacaaataaagcatgaaaataggagaaagaattaatggaaaagagaaagaaggaatagggaagaagtacgtaaatgtatgtacgtacctaatgctcgggtgggccgggtttaggagatgaaaaaaataaatctaatggatgtaaataatgggtccaccaaatttaataaaaatcaacggttattttttagagtgccatgtggcggtttaggagtgtttataggatgccacatgacgacttaagagcgtttgtaggaagtttaatagacttttagtatataataattgatttataatttctcaaaacaaaattctacgatattacttagaccactttatcaaaactgtgtgttaactttaatttttccaaaatatttaacttgttcgtacaattaagtaaataatttgttatccatttcaacaatcaactgaataatcggtatcaaacgttacccatgggtttatcattttctatatttctcttttgttgtctttttttcaacatttctatccaaatgtttctaatattattaattgtccttattttagttctctacataatttttctctctcatgtttttccatatacctatttgagagataatgacgtatagaaatatagctagaaaagtaatatgttaaccatacatcaatagagtataaagttgctaaccttttagatcccttcgatttgtataatatcaccaaaatattttcaaaaaaaaaaatagtagcacctcccttcccgctccttgccaatttttacagaaatggctcgggctggaggcaatactgaagtgtggaataaagatcgtgggcggcctgacaacacctgacaaaaggggaaccgagactaaaaatgattgagccgttggatcaccggttcataagagaactgagagatttgtgattttggcctatctgtgagatatttacactgagagaaatggcatgagcacttatcggttcttcagtaataccagtttccgtaatctgcgagatatttacacaggtaggatgtgtatttataaaagtgaatgcgtaagcttccaatgaccgtctatgctatacgtgtttgttaaaaagaagagagagagaggggggggggggggggagagccggagagggagagaaataggaacggaaggaataggatggtacggtatggcaggtagctgcagccggtcaggtgctacacatctcatccacagaaaaggtcaccgtacaagtagacaagtagtacgtcgggccatacgtacgcgtccatccatccatccagttcgcacctacatggacggctccctttcgtcgccaacaacactgcagctcgggccggcgcccctgcgccccacacaagttgttttgagatggggctaaaacttttaaatcttattacatcaaatgtttggccactaattataaatattaaacgtagattattaataaaacccatccataatattggactaatttacgagacgaatctattgagcctaattaatccatgattagcctatgtgatgctacagtaaacattctctaattatgtattaattaggcttaaaaaatttgcctcgcaaattagctttcatttatgtaattagttttgtaagtagtatatatttaatactctaaattagtatctaaatatatagactaaagttaagtccttaaattcaaataccacctttctcgcggcgttttgcggacattctgcatctctgccgtgccagctgatctctctccattctccccctcttgttaattggagttgtatgctcatcatgggctcatgcatgccatttcggccagggcatgaacaggcagcagggccatgagaagactagcacatcatcgggccatcagctatatatgtacctagctagctatagccaacacttcagtacgttctatgattagagagagaaggtctaagtttctttttttaataatgaaataatgataccctgacagctacacctaaatatatagattctaggtggtttcataatcatataatattttgttaggttgatatatttaattaagcactaattataacattttaaatttgttttaacctcgaaagaatcgcttcacctgcccaagtccccatgtcgtcgtttctatatgggcaacacgggcgacagcaaaccctagccagtgctactcctctccaacctcatcgctgatggagcgagctaccagcctccacgcgacgagctaggactgtggtggcaggacaagctagctcgggaaggaatggatctaatgcgcgagacaaatgggtggtgtgcgagcgacaacagtggtcgaggcggcaaggcaggtaatgatggcggtgtcctagtcacgaggaggggaggttttggccatgtgcagggttgcatatggccatgcctctagcgattgaagctagcgacgatgtatgctgatggggacgacggaagagagaacctggcacttccttgatggggatgtcgtgatccgagcggggctggaggttgtcaagggcaacatctcaagatgcggacgcggtgttgtcacgatgattgtggtcgcgtttcaggtggtaacatctcttttatggccattggcagccaggagctcggtggcatagcgatccagtaaacatagaggtggtgacttcgttgggagatatttgactatttgacactcttataggtagcaattaagtatttgccctagactggacacacaggttatagacacatgagggtccatatgtcatatactgcgagtactgacaaatagttaaacatcacacattaaaagtggcaaatagttaaatgccccccttgtttggtggctggtttggtgtcgacttggttgacagcactaaggcggctgagcggactagtcccgtccctcttcctatgcccatagctagatcggacaacaatatacaacaatcttggaggcacgatagatcttgatgcggtgccaatggctttgttgccagcggcatcagaaatagatgatttgaagcgtacaagtagaggtcgcagtggctgcaacagcagtgagatggcgtggaaacaaaacggctagctagttcggcatctacccgcccttcatctcaggcttggttgcttgaggcggggagttccactagggccgtcaagtgccggttgatggggtttctatgtgtagggaacgttgatgagggtggttaggaatctagactacttcttgatatcatctcaagtgcatttttgcatggcagggtttatcaggtagcagaaaatcagtatctagctggacaattctgacatcaaagtttcaaactaaacaagtgttatgatggttgttgtgcataagtgcataacaaaggagcaaggttgaaatgaggcacgaaagaattgaagtttagtattctactcttttcttctttgttgtttttcttctgtgtatctcaattatgagacttgaagtctaagtattcatgcaacctttgaccgtgtatctacttgtggatataaagaccgattttctatctattatcttaaagaaattaatttcaaccctaaactgaaagtgtgttagttctacaggtggatatataatgtttgtcttttcttttttaaagatatataatggataaaccagctgttgtatcagctattacaattgtttcacaccacaatggaaagatgaatatgcaaaagcttaacaagtacttatgagaacacaaaatttcaacttgcacatgccctattgctagatttccatccatgggtgttgaacacgcctctagtttcacccctctgacaacttgccataacgaccaccagtcaccatgtctccttctggattaaagaccaaaagtgtagccacgaagagcacaaagtcactagtgtagtcttagagatacatttttttttcaaaagcagtattaattaattgtatctaaccaaagagcagatgccccattcgatacttcggaaatgcttgtacctgaacgttcgagaggagacgaaatgtcagacgacactcaaggtgggatccactatcgattcaagtattcaacccaaccattcctaatccttatcctctcatcctattctcacattttcttcaatggtagggaacacaccaggcggagctagccattgttgccggtgaccatggcggtggtgacgggaagagatggcagagccatcgtcgccagcggccacggcggtggcagtggcggtaggacgacacggagaggaaggaggcactagacatggccattggtgaccatggcagaggcgatgagaagagatgctagagttatcattgccgatggccacgacagtgatggcagggcgaagcagagaggatggaggcaccggacctggccaatgacgtcgccataaacgggaggagattcggagggatggaggtcaaagtgatgacggtgatgggccgttggccgaggtgcgatgaggctcgacacagtgacaactgcctgagtggctgtagtcgaggagctcactgacgaggagtgcccgtgagttgcgagagatggttgggtagaagaaggcagacttagttttgtttttcttggagcttggcgatgttgcaatccattattatgtttttattggatgttgcacatattgatgtctttgttttgcaaccagtagttttcaagtgttgcatctagttaaaaacttttttatccagtcaatgaaacattttctcaagagcgatggtacattttctctccaagatacaaacaactgaaacattttttatcgatcgacgaaacatttctctacatgtggtccaacatcgtccgatattttgcaaagtatcatatatccgttttttagtgctcccctcactacttgttttctttatctcacactaatatgtggtaggcaatctccaaaatatgtggaatattgtttggatgatgtaacccaaagtctatatgaattactcgctatacaaaacaagctcgtggacaatcaaataaaagatgttagatcataatttcgttcatgttgcaaaaacaataaaactagatactgatccattatctcttggctaaattatctttcgttaaaattacccatgatgtatggaaaaaggatttaacatttaacaatattttaagaaaccacaaggtcttattcatgggttgattatcatagaaagggttattttcgatgtaaattccatttaaaggaattcttgtattgaaaaagttgcacatcaactatactatgtgtggttccacgctacgagactttacccacctaacgagaaacattaagtgatatggtgctcattactcatgctactgtgcaatgtttgttcctcacaatattgtacaacatggggtcttggaaattgagtggcgtttgtcctaaccatgtgtaataatgagttacctagtctagcttctaccttggtaaatgtttttctcctaaatattttttttgaagaagattctgccataccccttcaaaatcaagagtttaattaaatagccatgtactaagcaaagagtcttttgacatatagagctcccggtgacttccctctggggcaagataaaggaggaaggaaagacgtgggtgatagcagacgcaaaaaaaagttcaaaaattctccgcatcgggcgcccgatgggggggagaaaaaatcgggtgccccacacctcccaccctcccacgctcgcgcgccgcccccacaacgcgccacaccatgcacgccgttgcaacaaaccactcgcatatcacagaaacggcctattagggggatccgttttattttttgttccaccaacaatgtttcagctagtgtacttgtgatgtttcactatatatggatcaaatgttggagcggatttttgatattgttttaataaatttcattctgatggacacgtggtttgttgacgtacacggggtttaagtgttgcaatggctttaaattgtttattgcatacgtttaatcaaattattttatctagcgatctgaccgtgtttcacttttttttaagaattgaaacattctttcactatttgctaaaacattgtttttatatatggtgaaacgtcgtccgattttttggaaaccgttgtttcatacattgtagcaaaatgtttctgaggtaatttagttgtgtttcagctttttaaaagattgaaacatttttgatctatttagtgaaacatttttgatctacttggtgaaacaacgcccgatttttataaaaaaaaaaatcagacgcccgatctgtaggcgcctcgaaataagttggctaggtcaccatcctaatttctaacctataatctctctgtagaacctgctttgactttttacatgtataaatggcaattaatatttcttacttaataagattggtatggtctcgagctggtttgttaaaaaaaattaaccatgtactactaaagaggcatatatttttatatgaagattttgaatacctaacccttgttgatctttttggcctaaacgcaatactctatctagttctgctgtactaatgatcatcccctgccagaaaaatctggagctaaagtgatcaagttttttaaatatatattaacgctctgtgtaattgagttcagattgatatgattttatttaggataaataactcaatttaatatctatgtatccagttcgcaataattgattatctgactaattaattaggctgttatcaaggtatttaatgatcaatcattgtttaatcacatcacagcatactggggtatcagggtagttgctcgaggacttcctcacatcggtgtccccctgaagaggatggtggatagcagataattcggaggttgttaattctaaattaatcaaatattccaaaatttcaaactgtttggacggtgtacctaaagcatttaattgatttggtgataccaacattccattgtcctccgtggctcagtgcctatgattcccaggaatcttagtctctgatatctggatacttctaaaacctgacatatatatcccgtattcccatatcggatactctcggatacgaaccggacacatataggtgattttcagtttttcaaaataataaattaattctggatacttctctttgagcctcactccggtgctttctactcgtagtagaaaacgatctgaaccattgatctaatttgattgaatggttcagatatatttctactaccatctcatcttatggtagtagaagcgtgggtgggcaaatttgttaaaaaaaactatgtgcggagggtaaactcgtcttctaatagttactaaacttaacagcgtacatgatcacgacaccgccgctcgcgtgcgcgcgctcctctcttcctgcagccggacgccgctgccgcatgtgtctccccccatcagaggctacgcagcagggcctagcatctcagtgaagcgggatactttcgccataggccgtgaaggccccacggtgcacacatgaaaaacctgagttggatggatcattgttgcaaacgtcttcgatcgaatcaaatgcatgtctattaaatttcactgctactaatatatgagtgttcgattggaatgatcaaaggtagatctactgaatatctgaatctgacgatgaatggctcgggccgtgcctttcactctccgggggtgtttgtgttgatggagatggcactgctggctagatgggttagcagcttgcgtacactgctctctgttgcctttacaggattttttagtgctcaagctgtttctgggacaactaaattcagcaacaaattctttatgtaactttcttgacacaccattaatcaaatggtaataaggtagagtctcgcgtcaaaaaaaaatcatcaacaaagcgcaatcaagagttatatgaaacaaaattcaaacatggatgatttatatttctatcatattgtttcattcatggcacaaatagatccacgtaacatttgaaaagcagcaggcattaacctttaaacacgcagaagtgcaacgaaaatggcacaataccaagagcttaactgctactctgcaatggtgtctcgctgcggcacacactagttacatacatcatcaccaacagcagaattcatgaaacatcaagcactacaatttttcgtcaccaactacacaagtaagcaccagcagtgccaggatttttcgtcaccaacagtataattcagtataattcagtagcagcaactgcagtattttccagaagcaaactctagccggaatggatccaagcgagtctccgccgcacgcggaggggccgggatcgtcgtcggagtgacctccgaattgaactgcacaccgctgccccgattggatgcacgcggaacggcggaaggccacgcgcagccgacgctcgaatggattggttccatcgccgtgataagtaacatgcgagatgcagtgcctgcgtcgggcctgatgcgatcaagcgaccgagacacagaaatcagccccagccaaaattacccctaatatgtattagaagattactaatctaccctttaaaataaacggtcaggattaattctactcgtagtataatactacaagtagaaagcaccggagcgtcgccccttaattaatacttcgccgacacttctagtatggatatcaagcctaaatcaaagttatcccatgttcaaaatataaaacgacatgcgtgtatttagatatattaatatgtacaacttttcccccaaaaaaatatatgcaacttttgattaataactaaggcatcaatatatttgtttagtgttacatgatccaagtaataccgttaaattcatatttgcatatttgaaaatacctccatgtaatattaattctgtagttgttaatgctatataatgaaacaaaccaatgatcaaagtattatcgtgcaaaaattaatgccttttatatttttatatttttagacggagggattgtgtgatcgtcctattgattaaattaaattgaattgctgtctcctctatatttaaaatcttaaccttttgtttcttcatgtttatattatttttaacatgcaatggcgtatcgtgcatccgtatcatagtatcggtgtaacttacgtagatcttacagtgaactagcaataatcatctaccatactagttgtaccatgcatctaatgggtcagtcctatttcacactatagatatatatttagattcaacaaaaagaaaaatgttttttttcctgacttatgcattcgttaactagcgtagacactttcctctgcttcgcctaactttaattttggcaagttgctagtcactcataggaaaattgtgacttaacaaatgattatatgatatgtatattaagagcatgtttggagagctttctgagaagcagctggttgatagccagcttctgagaatctgaaaaaactgagttttccagcttctggcttttagttcattttctagattctacaactacaactacagcttatcagaatctgaactaaagactggattgtttgggggagcttctaattctagaaaaaattacaatagatagaagctcccctaaataggccaaaaaaactgcagcgagctacaattatcattgtggcacaactaatattattatacctaaacagtttgacactaatcaaattagtactaacacacacacatatataccctagtcctagctgtgcaatggatcgagtactgtgttgtggcactgtagattgagtgaacgggtcaccaactgggagagaagaaatcagtgtttggaaggagcatagcataggaggtgccgacaaggtatttcttgtcagatttcacctatgggccatggcaatggtagctgcctttctgctttaaactttttggatttttatgtttgtagtaagttccttgagatctcactactagaaaattgatttttcatggcgttttgaaaaatatttttcatggcgaccacgtgaaaaaaccgccagcgcagaaaatcgtaggggtggagggtcaagggccgccagcggaaacacatcttcgctagcggtctacttaagaaggccgccagcgaagatatgatatcttctctggcggctctcttaagctcacgccagtgaaggtattgtatcttcgctggcggtaaggggatgcggcccgccagcgaagatgtaggtttattcgctggcgggcctcttaacttaacgccagcgaagataccatatcttcgctggcggtgtgatgacgtggaccgccagcgaagatacctgcatcttttctggcggcgtccttaaccctccgccatctcaaataattttcaatggcggtttgaacgaactgacatatgaagaccgccagggaaaatgcgctgaactatataaaccagctacagtaacctcgagcaccattaggagcacgattttctctctcttaagaacacatacatagggggaaggttttgatctcgaatcttttcaaagatttattgtaccagaggttagttatactttgtcctactctttttgtcaacttttgttttcatttttattggttgtatgttgagatttgtcatcgcaaaaaatactagacatggaggaagaaaaacattttttatttgttatttggagctcaaaatggcaaactttgcaagaaatattgtgcatgatcgatgttccatatatatatatatatatatatatatatatatatatatatatatatatatatatatatatatatatatatatatatatatattagttaactgcaaaagaatgagctagctaggaagacaagaagagaaagaagggtagtttggtaattcgtccgagggatagatgtatgttttatatatgcagattttcggctagttttaattatcttgttcaaaatatttgaactaactaaagttgtattattttttctgcaattaattaattaatgcatagatggcggacagggtatggatggataaagagagatattgtgcatcatacattgaaggagtcgacatattcatgaaagcagctaagaagaatgctgcatctaagaagaccaaagatattagatgtccatgcgtgcactgcaaaaatcagaaaagttggaacgatccatctgtaatcgagcaacacttggtgacgcatggatttgttgagggatacacaaactggtcacatcatggagagatcctaagcaagcaagttccgaaccaggctacagtacgcaacgaagtgttgagctgggacgaggatgtcattgtagtagctgaagaagaagaagaagaagtgcatgcagtagaacccgttgatgatgatgatgttgttggtggcaatggtcagcacagtacagttaatgatgctgatgatggtaatgtcagcgtagatgatggtaaatttgtagatttggaagagatgttgcgtcatgctgaacctgaggttgttgctgggtccgctcgtgggttggataactttgatgcattgaaaaaggcagcgaatgatcttttgtacgatgaggtaaagggctgtgagaaggatttcacattgttgcggacagtgcttgagcttatgagattgaaggccagcaatgattggtccgacagtagttttaacgacttgtttgttctgttgaagaaactttttccgcaacccaactccctgccaacaagcacctatgaagcgaagaagcttatatgccctttgtcactgggtgtgtgaaagatacacgtgtgtgttaaccactgtatcctattccgtaaagagtacgaggatttggacagatgtccaacatgcaagagtagtcgatacaaaacaagccgtagccagtccgagggtctggatgttgcccttgacgatgtagaagagtccgatccatgcaaagacagtaacaaaaagaagattccccagcttgtcatgtggtaccttccggtgaaagattgtttgaagcgtttgttctcaaacccgagggatgccgaattgatgcgctggcatcatgaaaagcgaaaaaaggatgggatgattcgacatcctgcagatgcaagacagtggaaggaatttgacagaaagtatcataagtttgcagaggacccaagaaacgtaaggtttgcattgagcaccaatggaattaatccattcggtgacttgagcagctcacacagcacgtggccaatactcctaaccatgtacaacctcccaacgtggctgtgtcagaaaaggaagtatatcttgttgaccatccttgtacagggaccacgacaacctggtaatgacatggatgtgtttctggagcctctactggaggatatgcgcgatttgtggaaacacgggatccgagtttgggacgaatttctgcgggagtacttcacgctacatgcaattatctttgtcaccgtcaacgacttgcccgcactgttttccctattgggacagatcaagggaaagacgggttgcattatttgtgtggatggtaccgtgtacaggtatcttaagggatcgaagaagctagtgtacatgcggcaccggcgtttcttaagaaagaatcactcgtaccactcccaagcagaatatttcgacggtactgttgagaaaggtgtagcaccagaaccatggaagggtgataaaatgttcagaatgacaaaaacctgaaggttgtttttgggaaggtaaaaaagaaggaaacaaataagcgaaagagaaatgatgccgaagtgccagcaagccctagcgtgccattcaagaagtactccattttctttaagtaccttccgtactggaaatatttagacatacgccattctatcgatgtcatgcacctagagaaaaatgtcttcgatagcaccattgggactatactggacataccaactaagaccaaggatgggctaaaatcacgtaaggacctcgtggatatgcaaataaggaaagagcttcatcctgtggatgaaggtaataatggaaaagtgtacctaccgcctgcttgctacaccttgacaagagccgagaaaatggcattgtgcaaatccctacatggggtgagagtgcctactggcttctcctcaaacattaagcgactagtgtcgatgaaggatctgtcgctttcaggctacaattcccatgactgtcatgtaatgctcacagtattccttgccattgcaattagagcagtcgaactagttcacgtaaagatggtcatcacaaagctctgctatttcttcaattctatatctcagaaagtaattgatcctgaagagttaggtcctctccggactttcgctctacagacagtgtgcgagcttgagatgtgtttcccaccatcatttttcaatatgatgcaacacctcatagttcatatcgtgcctcagataattgcacttaggcccctgtacctgcatcagatgtggcctttcgaacgatacatgtccattctaaaaggctatgtacggaaccacgcccacctaaagggatccatgatagagggatacacaaccgaggaggtcgttgagtattgcattgattacctaaaagatgggaaagcaattggtttaccggtacctcgacatgaaggtagattatctgggaaaggaacaaaagggaagaaaagaatccacgacaatgactacaaaaaagtgaaagatgctcatttcactgtgctgcagcaacttgcaatagtggagccgtacatagagcaacacctgcatgaattacaagcaacaaatgtgggttgatctaatagatggatcatgaagaaacacaagcatcactttactgaatggttcaagaacctcgatctaccagatggccataccatggaagaaagaacaattaaaatgctagctgacaggccatcaagtgtgtataccttgtggcaagcatatgatctgaatggatacacgttttacacaaaagcgaaagacaaaaggagtgcatgccaaaatagtggcgttcgagtagaagcaatcgacacaactaggcaaaagagcatatactacggattcatagaagaaatctgcgaactagactacgggccaaatatgcagattccactgtttcggtgccaatgggtgaaacacccagccggcgtgtctgtggacaactttgggctgacaatagttgactttgaaaacgtaggccacatggatgacccatgggtgcttgtcgatcgggtcgctcaagttttctatgtgatagacccatctcatttgaagaaagacatagttatttcgggaaaacaaaagattttgggagttgatgatgtcgaagatgtcgaggcatacaatcaatatgagaacatgacactattcacagattttcgaaacaagatattacgcgtcgaagaatcaattggtgaatcgccgaagccatacatgagagatgaaggtgtagggaaaagtattagatgctaattcattatatatgtatcatgttggacgtatcgatgaattttaatgtattataatgcgtaacaatgatggatgagatgaatttttgtatatggaatatggtgacatgataattgttggatcaagaaatagtttgctataaatttatttgtatgcatgtattaaaaaaatatcaggcgcaaacattaaaaaatcatattatattttttttgataaattaatcatatttgtgtaaaaataaataaaattatttttttagttgagaatgacatgtggggccaaagggttttcgctggcggccggctttgcccaccgctagcgaaaactgttttcgctagcggcccacataagctaccgctagcaaaaactgttttcgcttgcggcccacataagcgttggtggattgtggattgtaatagtcagtttgaaatagtcagggttggtggattgtaatattgatgtcgttgccgatctcattgattggtaacaatatttatagttgtagtacaaaattagtatctaaattttgccttctttttggatttacaataagaaaatgattccatttcgcaactaacattaattcaccttcaagcgatatcaatggacaaacccacccaagagcaacccacgggtgacaagggcaaggaaactcagctagtcatggaggaagatatttgcacgcaagtagtcgcggaggaatcttcgtcgtctagctcaagtgaaccaggcagtcaatcgtatcactcgccgagtgacctccatccttctctggcaaggaagagaaagggcggtagcgacaatgaagttgactctgactacgttccccccgaaccggtggtacgtagcatataatatatgtttagttccagtcatattaactgcgaactatggattttaattaaagtcatgttatttgcaaacaatagttaaatgctccacgtcgctccaaaaggaaagcccaagccgcaactgaacctgaagctgaagctacagctgtcgtgcacacaacagctttaagcaaaaccaagaaaaggaggggcgagcgagggaagaacatgttgttgaaggaagtaagcgtgctgacgcggatgagtgagacaggggaacacctgtcaccggaagactcatgttcgaagtatagcaaccaatgtggggcggtggtcagggatatcatggagatcacatggaaggattggaagaaagttccagagagtcgaaagaacagctgttggacgtcgctgcaaagcaagtttgaatatccagaggggacagacgacgataaagccaaggattatgcgttgaagacaatggggaagctgtggcgaaactggaaaacagatctgaataagaaatatgtccagaagggactcacgccgtttaaggactacggaaggataacacaggcccagtgggatgagttcgttgcccttaagacatcggcggaagaaaaggagaagagccagaagatggctgagctagcaagaaggaatgaatatccacatcatttgggatcgaccgattaccggcaagcggtgaagaaatgggcaaaacaagatgaagagatagagaaggctgggaaacctgttcctatgaaaaatcacaacccacgaagcaggaactaggtgcgtgcaagaacatcggccttcacccctaaggaggatgtagtattcaaggatcagaagctccaggaggtagctgtcaagatgaagaacatcgtcacgcagcaacaggccgggacgttcgtgccagatagagaccgggacgagctgacctatgccttgggcaaaccggagcactctggccgtgtacagggagtttcctcaaagactaactagaaggatggattcaaacaggatgctcatacctacaagaagcgtgatcgctacaaggaagagattgactctcaggctagggcagcagctcatgacgaatgcaatatatactggagtcagaaaatgatgcacggtgctgctgttttagagcctgagccgagctatcctttcgatgatgtaacggaggatactccgtgcaagctcttgattccagtcggcagggcaggaaagaaaatactcgttgcaactgggaggttcataccaggccgcaggtttcattgccaagacattccggatgagtacgccaaggtagaggtctggacggtcattgaggcttaccggatgcatgagctcgactttccaactactgagcagattgtgtaccttggagatgccgtcgaccaattcatactatggcacaagaatgatattgaactagggtcaacggatggaactgatcgtccaccaaggataccggtgtcaccgtcgcgtccaccagtcgtagctagtccgagggatagtcctattgcttcaccccctagactagatccaccagttgcatcacctctaggaccagagccaccagttgcttcacctcgaggaccagagccaccagttgcatcacctccagtaccagagccaccagttgcatcacctccagtaccagagccaccagttacatcacatccagtaccggagcctcccgttacatcacctcagacagaaaaggatgcagaagaaccatcagagcctgtacaagcagagcctacaaagctagcggcgggtgaaattgaagcggtgcctgatcagccaatgcccgatcaaccagagcaatcgcaaccagagccatcgcaaccagaggaacctaagggtgccgatgtgccagtgatggtaaggacgcacaagcacaaagcaaaaggtgagtccaagaaaaattatatggtaacgacattccgaggaagggacaatgatatcataaatgccgaatttgataacagaaaattaaaagggttcaaacagaccttcgatgactatctcaactatatcaattccccagacgtgccacacgagtttgagaatggcaaaccattcatttacgactggcaactaagagaaggatcgtggcaactaagaaggtggcacgattggtacattagggcaagcaccatgaaaggcatcgattcattcacagttgtcgtgggggagaacatcttctggagcggtccttgtctactccaagtccatttctccgatatgcattccctctaccgtaggaagcggctggacgccaatttgattgccatctagtgtctgtaagtgctacacttgaacgtgttaatagatcactacacctatatgcgtagctcatttgatcatccattgttggcaggatgaattacgtggaagccgaagcgatgaaaaagcctgtcgcctacctaaacccgtgcaggataagtaagctgaaccacacatacatgctagacgagaagaagctaccggaacacatcaaggcgatgactcccgaagagaggaaagcttacatagcacaaaagcatcttgaaaagatgctcgatgtcgctacgtacgtagctattgcgcttgaatctacgcaggacaaggagtgtgtttatgccccatatgcctttgagtaagttgtaatatatatgcactaagagtatatacatataatcatggctcgactaacaattccgtttgcagcgaccattggatagaatctttcttctctatccaaagtacaatgaagtcatcgtcttggattctctcgacatagatagcaacacctatcaggaatttctaagaattatcgatctgtaagtaagatattagcatgacgtgttttaacctctgatgaacgtaaattatttatatccgcaaaacagtgcatttaaaaggtattaccaacgaggtggacaacgcaaaaactcaagagaacgcatatccgtccgcaataagtggccggtaagtacatatatatggatgtcacacagtactacttaattttcataaatgcttgtgtgtttccatgtaataacctattataccttataattattttgatgttgaaagtgtcacaagcaaccggtgggaacaacactatgcggatattactgttgtgagttcctaagggttaatgggaaatattgtgcaaattacgacgaggtaagtaatacacacttgttaaattagtcgctaacttgtattattgtgaatagttaatttccttaattctgtcatgatgatctgatgtagcttccaaaattccccaagtctgaaagagacctcaatgatacatccattcagaacattcaggtggacatgtgctacttcatccaccgtaagtgcgcacatcagcttgggcagtttttcgacaacgaaggagtcttagccctgccagagaacgaatccctgtctaactggaccagacgtataatatagctagggttttgtaattcattcaaaatacttgtaaatgttatgtcgtcggtcgaatttaatttgtcaatgtacatatatgtaggtgcttccgaatatttatatatacgtatattattctgcttcatatatactcaatgcgtggctctaaaatatgcgaaagagaacatactctgtcgatagctcgattagttatatcaaccacgtctaactctgaaatacgcgcacgaagaaaagaaaaaatagtatatataataatgttctaatttttttttaaaaaattgcatcttcactggcgggccacgtgtcagaactaggacggtccatatcttcgctgtcgggccacgtgtccatccacagaagccttacttcatttttcctagcgtgccacgtggcctaaaatactgtgagccgccagcaaagaattatcttcgctggcggccgacctaaggctaacgcaagtggagatacttctttgctggcggctgtgttatgtccaccgccagcaaagacatgtcttcgctggcggccgtcctaatgctaccgccagcgaagacatctctttgctggcgggcgttcttttctcggccgccagcgaagatgcattttggctggcggtaaataaccgctagcgaaaatcgatattttcactggcctttgctttctggcggctgcgatttctgccagcggaaacccaaaatggccgccacgaaagatggttttcgtagtagtgtctgtggccatttaacaaatttggatgattggattagcaagagtaacagggttattgcaatgtttggtagctcaaactttcccaagcttcaactataaatgatcagcatagtaaaagtatccagctagttgattgacgtagaatccacaatttaggttgcattaaggtcaacaaagcatgttttctaaaaatgacggagttttgttttcccgttagcttgggatcataaaatcgttagcgactgcgatgatagaacttcatcaaggatgaaagtagggatgcaagtgggtagttccgctacctgtataaaaaccagcttgctagtgtatttctcgtatggtagttcaaaatttagaagaaaaaataaactagaagtgggataagccggaaaaaaaaaacctgcttgcccgtcccgcttgcatccctagatgaaaggttcatctttgagctatggctgataataagtcgcataaaaacaaacaaactacaaaaaattaatttatagatacgaattagtagtgattggaatctaatattgaaaaaaatagactataatgaaaaacaacaaaatcaactttaaaattgaaatcttgattgtgattgataagtgaacaaacaggcaatgagagcatatgccgcaaaaaagaacctaagcttgtattgataagttgatgttgttgtgtgaaaggcagtgtttcacacgccaattaacgaaaagttttaattttgcacaaaactacacatttaccaacgacatgttggccacataagcgccacttgtttttattgcacaaaatctccgtgaaatgttgaatggttataatcacgggtaatgcaattagctgttttgaataacatcgtgtcaaagatgatgaaaacaagatgcgatttcaacaggcgaggttttgtaagatatttatagcataaaacgtggtgtcaacgttacatatggacaagacatatttttcttgtaaaaaaactcagtacatagatactattttacagctcagtcataaaattttctatcatcattcatcaaattacctgttgaagttgaaattcgttggaaatctaaaatttacacaaactctcatgagaattagagaatttaaattggaaattaaaaagtgataggtggctacaaaaggaaaacattacaaaagctgccccccccccccccccccggaaaaaaaatctttttaccttgatccctaagaaggcatttataaacaggagatgggttgctaatattcatgtggggctatcggtctaggtttttttttttacttggccatttgggatggtagaaccacccttttttcaatttggtagaagaggtggttctgatacaagatgttcaagatcagcatgtttgaaagctcgtaattgatggtatatacatgtgtaaatctacctatgaagcttatttcctgggatcaatcaagtttgctccttggaacgtatttggaagagttgggctcctctttggtgcaagttattcaattggttggctattaataatagatgttggacatctgatcaagaatccaacacattctgatctcctgtgttttttctcgcgccaagcgtggacagcactcttcttgagattggggttatctgatatggcgcctcaaccttcaactgatcattttctgagatggtggagccaagctactgaagattggaaaatagagcaagtaattaaaacacatgattaattaattattaattatcataaatttgaaaattgggttcatttgaatttttaaggaatttttatataaaaacttttttcaaaaaatacatcgtttaacagtttggaaaacgtgttaacggaaaacgagggtcttaatcgttttttgtgcgcacgcttctcaatctactaaacgatgtaattcttataaaattacaaaatttgtttaaaaaatcatattaatttatttttattttctttaattaatactttaataacaactaggtggcccacgcagattgcgcggctagcaccattatattttctctcatacaatagcatatatgttttctcattatattatttaaatatattaaaatgacaacataattttaaattttgcaataactttataaaactactaatgtgtaatattcatattatattttatatacgtgttagttattaattatttttaatataaaattttagttatttgtaaattatatatattcctatatgtactctagactcatcttttaatatttcttttttttaattccgaattttctgtaaattgtatttctaaatagactctatgttcttcttccaatattatttatttttatttctgaatttttattatttctaattgtatttctatgtggactctaaactcatctttcaatattctttaatttttaatttcgaattccagttacttctaaattgtattcctatattgactttaaactcttattcccatgtttttcttaattttaaattttagttatttgtaaattgtatttttatacggactctaaactctacttttaattttattatatttattccaaattttagttagttttaaattcctatatggactctatactcaacttctaatattccttattttttattccgaatttctatttttttcttaattatatttctatatgtactctgtactctgcttctattccttatttttaattccaaatttctattatttcctaattgtatttctatatggactctatactctacttttaatattccttatttttaattccgaatttcagttatttcctaattgtatttctatatggactctagtctcctcttctaatattccttattttttaattctgaatttaaactatttataaattgtatttctatgtggagtctagtctcctcttctaatattccttattttttaattctgaatttcaactatttctaaattgtatttctatatggactctgttttttctttttctccgattaatgtaagagtttctaggccatgagagcgaacgtggagactcgtttttctattcctttaataataatataatagataatatggtaatgagctacctcaaccaacactatcgaagacaccgagggccgaggctgcggtgcggtgcggcgcggcgcacttgggtagtcaccggctgaggctgaacgcaacgcaaacgcaagcaatccaattcttccgcacagcgactcctcgttggattcccaccacctcctctcctctcctctcctctccttcttcctcttcccctgcactgcactgccactgcattaatccccttcaccgattcctcctctcctctcctccacctccacctccaccgcacgcaccaaaccgcagtttctctctctctccctttcgctgttcctgtgtgccttgcttagctgccgctttcctctctccctccctctctttctttcttcctctctctgctcaacctcacaaaaattccccccttttgctctttctctttctttcctccccgatcgacttcttcttcttcttcaccttctccagttctcctcatccgtcttcggcgatctttgccgctgtaagttagttacttcttgattaagctctgtttgtactcatgaagcgtggaatgttctttcttttttattcatgtcttgtcaggttctcttggcttctttgcagtgtgagtacttttattttgtttcatttttcctcttcttttttttctttttctttttctccctaccaagatacttcagtaatctttagcagaggggttgcttggcaattcggtttgcatgcaattgccgtgatactccagagtggggactctcttctctgaattcccctttttttttctttttccctttttccacacacccgtgactgtaaagcttctgtctttcaatcaactgctgtagcatgtagggtgctagttgcatctttagatgcagaggatagaacctgttcttccattctcttgcagtagtggtagcatccactttgcagagatgaaagaaagatcatctgcttcttgtgtcctgaatactcccttttgttttcttctctatagcatcttgtcagtagcagcattggtttataatgacatcgatttaggatttcaaggaaatggttgatcgaggctttgtcacgtcacctgcattttttctgtccatgggactgctctacctctcacgataaagttgctctcaactttttttttccacactgtggaactgactggtccaactaaacactcatgctgagcaaatgcatgcacctttatccatttggaggcctgtaggcttaattggagtaagaaaatcgcttttaaaaggagaaatgctcacaaactttttcgtttttggaaaatttgtcttatatacagtgagttcagttgtcttatatagcgttataagatgatttctgttacaattttcgtgctattttgttgtgtggtaattctcttcatctctgattatatgtagtactatttaacagtctggagttattcttaaagaaaatcaataagctcacagttttttttaaatgtccagaagataaagattccattcacacaaaaaaaaaatctatctttcacatacaactgtgattattcccttctttatgttcattgaaatatttaattctttctacttctaaggggttttgtgataaggttgtaaatgatgctcctggcttggtgctgtcactatcagaattcttctgcatgtcgttttgaacttgtccagtagttttgtagtgcacattcatgtcagttctagaggccaatgacttagacctgtttctggcattagtacttttccttttgtgcgttatcttgtcttggatgtagcctagagttctaccatatttctagaacttggacatatatatcagtttctgtcaaaacaattttgggtcagtgttttgtttttcaaatctgatggtgatgaatgtttgtacccaaatacttgtttcagaacttctatagatatctattatgttaaattttgatcgagactgattttgcatccattcagttgacagtacaattaaatttaatctttccatgtcggtttttatcctctgaaaattctctagtatagcagttgcatgctttattatgtcacctctctgccttatgtcatacacacaaaaaagaggagagttgctgttactattgtcaaaggatgattggatcaaagaatgtctatttatctcctttattttcctatatccgtaatgtcgtggttgcacttttctcttcaaagtgttgcttgtaatacttttgtgaactagatttttaaaataatccatctgacagtaggtcggttataagttattctctagctataactgacttctcttttttaaaaaaaaattcaggtgaacatttgacagtttacaggttcctccatttcagttgttggattaagaaagaggctttatgctttataaataagtaagcatcatcatcaatataagttgtggctgctcttaaagatcctcagattctgtacaagttcagagcttcctctgtttggcagtgtcagtacacgtgcttgcatagttcataactggggtggagatatcttagtttcatgttctttgtgcttcttggctcttacccagctggtttaacatctgatgggctgctcaccttctaaggtgtgttcatgtccacattataagggcagtttgtgcttctgtgactgtggatgctttggacaaacacctgactccccaagagagtcaaggggaaaatcaaaccgggttaggggaaagacagattctagtgcttcagatgcttcttctgatgacctagaggaagatgatgatggattgcaccaaatgaacattacaagggactctaatgttggtatcaatcgactctcaagggtctcatcacaatttcttccaccagaaggttcacgtaaagttcgaatcccattggggaattatgacctgagatattcctacttgtctcaaagaggctactacccagaatcattggacaagccaaaccaagacagtttttgtatacatactccatttggaacaagccctgatgaccatttctttggtgtatttgatggccatggagaatatggagctcagtgctcacaatttgtaaagcgaagactatgcgaaaacctgctcagagatgaccggttccgtactgatgttgttcaggctcttcattctgctttcttggcaacaaattcacagcttcatgcagacagcttagatgattctatgagtggtactactgcagtcactgtgctggtgaggggtaaaactatttacattgcgaatacgggtgattcacgtgctgttattgccgaaaaaagaggggaagatgttgttgctgttgacctgtccatagatcaaacaccctacaggactgatgagcttgaaagggtcaaggagtgtggtgctagggttatgacgttggatcagatagaggggctaaagaacccagatgtacagtgttggggcaccgaggaaagtgatgacggtgatcctccaaggttgtgggtgcaaaatggcatgtatccaggaactgcttttactcgcagcattggagattctgtcgctgaatctatcggtgttgtcgctaatcctgagatttttatcctggagctcaatgccaaccatccattctttgttcttgctagtgatggagtttttgagtttctttctagtcaaactgttgtcgacatggtatgttctatctaccttctgcataagttgcaattatgttctgagatcctaaagtgattcccttcagtactagagatacagagattcccccacagtatcagaattcagttctcaataatcatttactttgaaacagtagggaaggcccccctaatattctgcgtgcattttaattcatcgatttcccttttccactgtaccaatttgttggctaagatttccccacaatgtttatcaaaattaatcaacttctttattaaagagcccaaacaattctattaactatttttcagataattttagatttgtgaaatgaattgttttatttacttcttacagtaatgaatttgcagattgctaaatacaaggatcctcgtgatgcgtgcgctgcaattgttgctgaatcctatcgcctctggctacagtatgaaactcgtacagatgacattacaataatagttgttcatattaacgggttaactgatgtatggaattttcatcttttacttatattacttccactgcactggtttcatttggttccatgaataatcctcattcttttactagatggaatgtactcaaactgtaatgaaagtatctttacaaccttcccaacaagtcgtagaattggtaggctcagaatcaccatcgacaataagtttgaatcccaagaaccagcgttccaggcaagatctatcacgtgctcggctgagagcacttgaaagttccctggaaaatggtcgactatgggtccctccatccccatcgcatcggaagacatgggaagagcaagtaaggtcaccaatttccatcactgttgaactttgtattagttcaggagttcttgatatcctattactgacgagttaaaaaaaaaaactgatatgaaggcacatattgagcgaatactacacgaccatttcctcttcaggaagctcactgactcacagtgccatgttttacttgattgcatgcaaagagttgaggtgaaagctggggatatagtggtgcagcaggttcttattttctatgcttatttattttactggtactctgatgatattttttctggcttctaagaaattatttaatagtgggattatgtgatgcagggcggtgaaggcgagtgcttctatgtagttgggagtggtgagtttgaagtgctagccattcaggtatccatttttattcacatttatttaatgtgatattttcttaagacgctttttgcatagggtgctaaaactacaccctccattgttctgtacttgtcattttgatcattttttgagttaaaaatagtagtcatttttttcaagattgaatttcctattttgtccatactatgaatttgacattgtgattggcacatttaattggaaacctctagagtgttttttaaataagaagaaaagaaaaaatgtacttctattcagacgggtttaatcacttcgataaaagaaatcaactattttacaatataatttgttctttaacctttattcagtgatttcgaagtctaaattggtgaaatgataaaaaaaagcaggaagaagatggaaaggaagttacaaaggttctacatcggtatactgctgacaaactatcttcttttggggagctagcactaatgtgagatttgtattcacttgccctttagtatatttgctctgatcttttgcaccatgttttaagaagtcacgaaaattgttcatgagatcaatcaagataagtatcgtacaatagttatgaacaggtgcttacaaaaacgataggaaaacgtagtgccaataaaacccactactaatcggaacagtttaccctgtctcctatacagttctaaagcttgaagcttagtcccactagctaacatccagaattataaatacaatcgacttgattttttatttttattttttttgataaaggaagcttttattaatctcagacgattacatcaagttgatagaaccatactaagaaaactcctggcctctgcataactaggatgcacacagccaaaacacacaaacccacaaacccacaacttgattttttatgagaacaaactactggtgtgggttgatgtgtaatctctccacctttcttagtttagattttttgggtgaaagaccatccaactgtactcaaatgtacacttagcaacagaacttttagtaatggccactagcttttgaacatatcatcacttatgaatctgaaacctaccataccatgacatgagaaggcattagaaaataacattatggatccctccatggctaatcacagtaaaattaaaactaaatccaaaatgtatgtctatgtctctttatgcatgtattatgtatatgatggaaagttgaatcaattcagatggacatagactcaagttactattgttgaaaaacaggtataataaaccacttcaagcttcagtccgtgctgtgactactggaactttatgggctctaaagcgagaggattttcggggaattctgatgtcagagttttcaaatataccatcattaaagttgctccgatcagtggagctgtttacgagattgacaatgcttcaactaagtcaacttgctgattctcttgttgaagtaacttttggggatggtcaaatgatagtagacaaggtacttggactggaaaatgtttcctttagtaatattgttagaatgttcttctgcaaacttatgagtttcttctttatgttggcttacttattttgtgggtctttttttcagaatgatgatgcatcttccttgtatattattcaaagaggtcgtgtgaaacttaaattggctgcagatcaggtaaattcagatgcctgggatcttcttagttctcaaacaaaggtggcccaatcaagtcgagaagatggtaattacgtgtttgagatagatgaagggggacactttggagagtgggctctctttggggagacaattgcttttactgctatgtcagttggtgatgtgacttgttctactattgcaaaggagaagtttgactcaattattgggcccttgccaaaagtttcccagtctgattccaagtactgcatctgaaatacttttcacatagtttactgagcaaatgtttctcaattgcttactttgtcacatggatggcatctatgtaggctcaaagattccttggttcctaaagggcatggtgcagatgatagttccttcaggaaggcgcagctatctgatttggtagggggttagtactacccttcctttcctccagcatctgtttgtttatcagaggagattttgttgaaattttatacaaccacgtgtataaattttatacggctatatctttgtccacaggaatggaaaatgtgcatatatgccgctgattgcagtgagattggtcttgtccaactaagaggttctggtatgataatcagtttggccttcagtcattattggatcaattaattccctaataaacattatttatgtttttatctaatcctattttgtttggctgtctgatcatggaccagacaagatcaaaagcttaaagaggttttacatcaagagagtaaaagaccttcataaggaaaaacacgtatttgatgagaaggatctcatgaaatctttgagccaatcaacttgtgtgccagaagttctatgtacttgcgctgatcaatcctacctaggaatactgctgaattgttgcctttgttgctcactggcttcaatacttcatgcaccactaaatgagtcgtctgcacgattctatgcagcctctgtcgtcgtagcgctagaaaatctccatcaggtaagattttgattttgtttgttgaaaatttaacacaagaaaatttgtctctagggtttattctaacaggctaatccatacacgcttctcccgatgtaagtactaatgcatagtatatgcaatttcagaggtccattctttacagaggtgtttctgcagacattcttatggtcgaccgatcagggcatcttcaactagttgacttcaggtttgcaaagaagttgcaaggtgaaaggacttacacaatatgtgggattgccgactctctagctccagagatagttcttggtaggggccatggattttctgctgactggtaagtggctgtttatcacttccctatgtgaagcccacatgccatgtgttctgaattttatccaatatggatttatggctttatcttgtctgtccaagtgtacattgcttttaatgtaaatggtgatgattctgggtgaaggcatttacttccagattcacatgcaaatcttagacatttttacctcaactttctgacattttcagaggagattgaaataaattaatactgcaatggtaataaaacatcaaagagaaaccatgtgtttaattagaaaccacatattcatatttcttacatcaccttcatctcaaaagtagcacaaattatggtgccaatgaatggatatagtacaatactcgcgcttttgagttgtaaaagcacatatgcatgccttcgttcaggtaaagaatattaacagatggttctttggtttttcatcatcaggtgggcgctgggagtgttgatttatttcatgctgcaatcagacatgccatttggctcttggagggagagtgaactggaaccttttgcaaagattgccaagggtcaccttgtcatgccatcaacattcagcatcgaagttgttgaccttattacaaaggttatactatcccattatggattgttgtttttgattcagcggttcgtctattattcaccttgtcaggatttcctactatattgacacgaatactctctgaacagctactcgaggtaaacgaaaatgcgcgccttggggccaagggagcggaatctgtgaaaagacacccctggtttgatggcattgactggaaacaaatagcagatggtacttatacagtaccccaagaaatcaccgatcgtgtcgacagctatgtagaaactcttacagaggacttgacagcatccccttccatgccaagtgaagaaacagctgatcaggctgctccagaatggatccaggattggtgatctcagttgctgcatgaacaaaaagatgtttgggaaaacttgtttagcatttcaaatgaaaaaaaaaacgggtacatacatgattacagcatgtgaatttttgtcgaaatggtggattatacgtagcaacaattctgtatagaggaatcatcagctcaacctgcaaccatctgatggatatgctagcaaaaatgtgaaaaatggtgttgcagtagttcaagcaggagccagaactggtctgcagggagaactaatgattcctgtggtacatatgtatagacccttctttcatttgtaaatttatttgtattattcatctgtaggtgaaaattataactgcctacctatgtaattttgtataacattttgataagaaaacaggggccatgtgtctgacggtgacttctgaacttttaatttttgccgtagactgttgtgctcttttgatagatttaaagaaggctccaaatccgttactatttggtactttccaacaatgaggtattttctgattttctccccctatttgttgcactagccttgcaatgtagcacagcataatttggtttgattacttcgaatgccaccatgatgatttggatggcttatctatgcagattttcttttgaaaggttgtttgtgcataactagattatcagattatagaatcaactaggaaggtgacccacgcgatgcgtgggcatccgtactatcataacgtaagaaattatatcttataagggcaaactataggttggatatatctgaaaaccattcattgacttagaagatagatcaaggtcatatgacatttgaatttacttttgactgagtgagtaaatatcatgtatacgtgtttgcgaaaagtaaatatcatatataccatttgaacacataccatacaatattgctacaagtaaaaattgcgatagcaaggactcaaagttattgtgatggaatcgtctcatgaagatgcatgatttagtgacaaccaaattaaggatagattaacggttggattgtttttccctttatagaagttcaaaattttcatattcttttccgaagttttaaagaatttttgttaggacacaaatcatttgcagaattgcttggttgtgtagtgcaaaatatcagcaattgtttgaagcttttctttttatttctttttcgcatgtttgattgttttcttcgaaacaatatttgtttgaaataagagcaaaattatataaatttaattggtatgtatagtgtttatcggatcaccttagctgccttaggtacgaagcttcgtcatacgtgcagaaagcaaacatgcacatgtgcgaggtctttagaagtttcattttacttttataaaagatagatatggcatgcttgttaataggtccttaataggtatagttaataggtccatcagtttaagtgaaaaccgatatcaaaatatttttattaaaaatagtataaaatagtgggctcagtaattaatgtaaaatattagttaatatagatcataaattggcaatttactggtagagaatattattgcgtaacatttatattaaacaacatgtttttaaaattttgatataaaataatgatttgatataatagatacatcggtttaagtaaaaaaatatattatattgttaatataaagggcaaaataatatagttttataaaatttattttcaaaaatttgtggagctaatttagaaatgtatagatgatatatataatctatgtttataaagttataatttcttcaaatttattaccactcctaataattacaatttcgtcaatacatgtagaagagaaggaagaagaaggaagcaaatgcacgtttttagtgacataattatatttttatgtttttccactttatctttttaaatgtacgttacagttgtatatgtatttttggcttttttataagtcgtacgtaagtacatttctcttgtcggtgcgctgagggagattaggagagagattattaatagaatttaatctaatggtcagagataacagatccatcaatttaaataaaaattgatggctagatattttagttttttcctcacattttctagatgtttttctaatttattagagtgtatttttacaacttaaaatatagttaatacgaatattgattttctatctcatctaacctgaagggaaaaaaagaggaaagaacaaagagggtaggtacatatgtacgtgcacgtccatggagagatagaggactttttctacgcgtgattcttttttccagatgagcgtaatttcaaaatcttaagatagatctatgttagctaaataatagaaaaagttagctaaaaataagagagaagagggaagggaagagttggagggtggctagagggagggagcacgtgctggctaccggaattttgaattttagagagatctaatggttaaaattaatgggttcaccgatttaatggaaaatcaataaacttttctaatttattataacgccatgtgacaacttatgagtgtttttagagcatttacattgtacatgctcttaggagtcccacgtgtcggcttgagagagtttgtaggaagtttaggtgttatgtgccctctaatataggccattcattttctttgaaatccatgcaatttttttaggagggtaacatatatacacaagatattctttttggcttcttttcttgtcagtactatgtattcatatgtacgcaggatttttttttgtttgggaggaattatttttaatagatgtgatctaatgctataaaataactggttcaccaatttaaataaaaatcgaaggtcggaatttctagaatctcctattataattacgtaattttaatacgaagatgaattccaatgtcaatagcataaaaaagcagggttttaaatctcctgctatagttgtttgaaaagggtttagctatttggtctcatgtacaatttagccaccatagctctatttagcccgctatagctgccgctatatctgtttgagaaactaaccgttaaatggcttagcccgctatttaaaacatcctaaaaaagtagaggttgtagggtaaaaaagggataaatggggagagggaaagaaaggagggcacataccttacctaggtacaaactggatgaagcaggtgtacatacacgcgggagagatgagagggagggactaactcttcttttaatctaatctaaatctaaaataatggactcaccaatttatatctcatgtagtaaaaatatttttattcggtgaataatggagtaagtatatatacgtacacaggaagattctttttggcttttttcacgtgaatagtgctatatatttataagtacataggatattctttttggtttggaaggtattattttttatagatctaatctaatgtacaaaataacttgtccatctgatttaacgtgaaaatcgaggatcgattgctttaggctgtgtttagtttctaaaattggggataagtttggggaaatttggtagtttggaaaaaaggttaggagtttatgtgagtaggaaagttttggatatgatgtgatgtgatgaaaagttgagagtttgggggaagtttggtgtgaacagagccttattttgggactgtatatgtaacagcctgctgaaattttttgtggtttcagcaaatatacgctcaaaaataccaatggcataaaaatgaggtgatataaatatattgtaaggtatttcagataaaattaaataaaaaagtttggggggagtaaaaaaaaaaaaggtggggcacacgttcatgcatgttacatgcgtgccattggggcatacgtatgcgctcgtgagacgaggggaggactaattgactttttttaatttgagataatctaatggtctaaaataatggatctacctatttaagtgaaaatcaagggctagatatttctaatatattagaatgccacgtctaatatattagaatggcacgtgacaaactaggagcgtttttaggagtcccgcgtgatggtttgagagtgtttgtagaaaatttaatggacttttagtatataatagattgttcgatcattcgccacctcaaacttaatctctctcttaaaaataagaaaaactccaaatgtccttagagcattaccaacggagtaccaaaattcaatctcctaaatctgtttttttatatctgtaatgggatttaagggactaaaaatatcctctctccaaggatatataacttcaaaaaaaaaagagtgggccagtaaaaaacattcaaacagaattgaccctctcctcccgtacttccacgattcctctcaatgcgaccatggtgattaggagtgagaacatcttccgagttgtgaataaggaaatttctagagacggggatgaggatttttgagagtttgtttagtatgaggctgaattttacttaaaacctaaaaattttgggttggcaatatgttgcccatgcttttatatttttagacggagggagtaagatgtgctctattttttctctaaattgttacgtctcaattgaaaagtagaaattgaacagttttattaaaaaacatgtgcttaaccgaatcacatgtttttcataaattgtgagctgtcgtgtgttcttaaccaaaattaaatattttaatagtcttagggcatcctcaatgtatgcgtgagcactggacaataaaggtggggcccagtgtaggtagcactagttaaatctctcttcacaatggttagtgtgagtgggaggtgttaaagtgggtcccgttagggtcccactaaggaaaaaaatatcaacacctatcaacagccgtggagtcattcgcgtgagaaaaaattagcgtcctcactcctcagttcctccgcccgatccctaatctggctgtttcgacttttgtaccactcacgggctttcttccttatcatctcatcagagtatccactagtgagggtagttctagctttagcataaaatccatgaaactttgtaacatctctcttcatgttatcctaatgtgtcctgcattacttaggtgtccttttattcccattactaggcatattggtgttaaactctacagccactgccttccaatactattctgatttcttgtcattgccttttatgggatcaacagaattgttcaaccaagaactcatcagtcgcatgttgtcatcttcggtccaattgatgtgtatcccccttcttccttcttcactgctatcacttccctcttcaagatcaactacttctttctccttctgtcttgcaaggcttggagaagctgactctgatccatgggaagaattgttggttgcagccccaagtgatgaattatattgcatcccaacttgtgatttactagctgcaaatccatacacttgattaggtgagcataccatactttcttgaagttgaacccctggaaagctagatggagttgtttgcccataataatcttgttggtgggcaccttgaaagattggaggagggtggctatatggctggtagttagttggagtaccaaaaggatgaaaattatgtagaattaagtcccaaatattggggaaaatttgtgggaaattggggatgaggggggtttgggccatcactctctactgcttggcttgaggaaccttgattgagcggatttgtaaaagttttgttgaaaggatccatttatggtgtggtgaaatggatgaatcaggttgtgttgctcgttcacttgtgggttttctacctctgttttataggtattagcggcaagaaaataaagccaacggctagaaatgttgtagcaacggccacaaccaagactccaggtctaacggctagaagcttagcagttgaactgatatgtatattttattttttttgaccggaattactgccagggctttgcccagtagtgtaattttataaaaattaaaaatatttacaaagttacagagttacagaaagaaaaccgcaacaaagactataaagtttgtaaccaattaagaacaatttgctttaaagcatccttcattttgcacatatgcagaagaacttctttcacaaaaagtgatctccaggcttggaaggagggttgaatgttctgaaagattaaaccattcctccgcttccatatgtgccaagctgccaaaaagaaaacctccaggaagcccttttgagcaaacttagtcttgctagggcaatcatttgaaagaactccaaatcatggttccactcaattcccaggtgctgccaacacttgatactgaaaggataggagaagaaaaggtgcaaccttgtttctctgtgattagcattgcataaaacgcatgtgaggtcatcatcttctttggcacagtgccttctatccagcatttctcttgtgttgagtctgtcacagaacatgagccaggcaaaaaattttatcttcatgacacattttgttttccacaaccaaatcatgggtctagggggttgtaatgcagaaaaattgagcttatagaatttcttagctgtgtacttgtctgaaccctagataaaactccaagcatcccccttcctgactgtatgtttagatggcctagaacttcctctagctgcagaaattcagaaaaggccacatctgagagaggtagaataaaagaatcctctaaaggtcttgaacacgtggctttcactgaatcatttttatacatggccgcggcaaaaatattagggtagctagtgcatttaaaatcatcattccatagatcattccagaaaagagcagttgttcctatcctgatttcacacttggctactcccctaaagatatctgcaagagatgtgatatccctccaccagaatgaacccttattcaccatcaagtgtggaactttagaatcataatatgtttgtgagatcagttttacccagggtaaatcagcaccattgtagaatttgaccatatgttttaggagtaaggctgtgttttgaactctcaggttgatcactcctagtcctcctttctctttaggggtgcacaccctgtcccaagaggctagagatttccttgtaaaagaagggttatttcctctgcacagacagttctttcgagttgtgtcaatggccttgatgactgtaactggtagctgcaaagaggacatatagtaggttgggattgatgaaaggactgaattgatcaatgttaaccttcctccttgaggcagaaacatggagcttgctgtcaaccttctttctaccctgtctaacaaaggtgcaaaatccaccactctaggtctagtggtgcccaaaggcaatcccaaataagtgaaaggtagagaaccaatttgacatcctagaatgccagctaacaaatcagctttgtcctgtttgagattgagagggtccaagcttgatttatcaaagttcaccttaaggcctgtggattgagaaaacatatttaacatagccttgaaatagaagatttatcttttggatgctttgagcaagatcaatgtgtcattagcatactgtatgattgggaaaccatccccattgctttcattaattggctttgagaaaagaccctgattgaaagctttgttgattatcctttgcaccatctctgcacccaacacaaaaagcagaggtgagagagggtctccttgtctgacccctctcttgcacttaaaagagttccctggcaccccatttagaagcaccacagaagatgcagtagagaaaaccatttctacccactcaatccattttggtggaaaacccatatgatgcagaactgagagaattgcatagtgctcaatggtatcaaaggctttttcaaaatctaatttcaggaggacaatttctctcttagactactgacactggtgaatatattcaaaagacctagcaagaaagtcttgtattgtttttcctttaatgaaaccatattgattatcactcaccagtttgaggattaccccttgaagcctattagccattaactttgttagaactttcaggcttattctcatgagggaaataggcctgaagtcattgacagtctctggggagcttttctttggaaccaaggttataaaagagctatttaggatctccaaatcaacacatccagcatgaaaatgagctgccagtctgtaataatcttgggctataatgtgccaacactttttcatgaaatagccattgaaaccatctggtccaggtgctttgtgagctgggataatggagatgagactgtcaatttcctgagtagaaaacagatcaaccagactactcaaatatgtatgtatgtcaaaaagagtatccaggtcaaaagccatctgtggggaatttgaaacacctatcctgttcttgaagttgtgatgaaaaagatatgccttttgctcatgcaaatgcacagtctgtccattgtgatctagcacttgtgagacagtgttgaatctgaatctttcagtggctattgattggaaaaattttgtattctcctccccagcatcatccatctattagtacacctttttttttcaataggccttcctgaactccaacaatttcaaaatttgcacttttacagtttctctgaaattccactcatagactgagagcattctgttttcttcaactaaatccaaaaagtccaccactttgttgcattttttttaaaagtcccatcaatttagatatatttttactccaagctaggagctttttccttagcactttcaatttaaaagagatgcatttggcaggatcatcaaaaccaagatctaaagaccaaactgcctgaacaatatcaaaaaaacccctccatctccacccagtaatttccaaatctaaagataggagattttaggattttaatgttaattttcactacacatggcacatggtcataaatgtttctggttaaaggcaccactattgtgttaggataatccaatgtccatgaagccgatgtaaacacccagtccactcgttcaagaagaggattctattgcatattgctccaggtgaaatttcttcctttaagagggatttctagaaggcccagatattttattgttgtgaacagtgtaacaattatattttattctcttatgtcacgccttaagcttaagcttgtttttacaagcatgaagcttgtggtgtagctccacaatgcttaaagtcatgtactgttgcagcatcaattgcttaaggttacctttttcacacattgaggatgcccttaacacttatcttgaagattccatagataagattgctgacgagagtttaaacgttgtcgaactaagtttcgctatatacacacaaaaattcaatgaaacatgaaaaaataagtccaatacaagtacttggataaaaataactccgctagcttaacctataatagctatacatcaataataacgggctgattcggttaaacatttacacgccaaggtggttttgcaatgaaattaagtatagggtggacatttgcaacaaaataatttatggagtgaaatgtcagactccaaatgacttatatgatgtgatggtttttctaattttccattatatgtaaaatttctgggtttcatggcgcataaaatttgtgggcctaatttgttaaaaggaaaacgtgggcctgggccctggtgtgtcagtagcgtcgcctgtcttcttctccgagagattaaaaaagagaagctccttgcgaaccttgagagatggcggcgacggcggcggcggaggcggaggcggcggccggcgacgaggcgtggtgccgggagacggtgccccgggtgatggagctggtgagcccgcgcctcccccagcgcgacgcctgcgccctgctcgccgtcagcccctggtgccaccgcgccctcgtcgccaaccccaagctctgggaggtgcggtaccgcgtcgcgtcgctcccttctaccttcttcgtcctcccgctgcttgctcttggtctcgactctcgaggcgtgcttcttcgttgtttcgcgctgctgaggaagtggtccctcgcctgggcttcgtcgctggagtggccggtgatttagctcgtgtagtcggtgcgcctcctgttcggccttgttctgaattgccaaaagcataatgcagcgaattcgtactccatgttcaaatctgtcgcaccggatggtagcaaaatggttcttcgattcgtccctttttgtttattgggtcatcgtattgtttctctatttttcatttttgaggggggaaagtaatcgtaattttgcctgctagagttgaaattcagattgcgggactcctgctagaaggattattagtctctacaatacttaaattatccccatcttgatttattgtgtaataatcttgatttttttcccgaaccatgaacaaatgcctcctcaatatttaatgtaggtgcttgatctgcatgagatgaacaaagctggtgaccgacttatttcagcgatatcactggcaagaataatcctacttttgaatattatattttttttagtgatgaactcatgaactgatgaatagatgcttgatctaccttctgaatgataattcatactatttgtgtggttgctcatatttctgtactatttgataaaacatcaacgttttctagtgcacactgcacagcagcatcatactgtagtctcagtttaaaatctttaagttgctttggtgacatgttttgtcccattcttccacagccaagatattgtcatctcaaaattattaaccttgaatttgctcaagatattgatgaccggcattttgttcgcctgaaagaaatggtaagatttcctgtgacttttgttcttttacttagaaaaagattgagctataatatggatctgcaacttaattggttcaattacaatgatttacagggatgtacctcactgcaagagttggaattattgaacataaacgcatgccaaaaagtttctgacaaagggattgaaactattacaagtctttgtccaaaccttcgggccctttctatctattggattgttgggtacaccatttctgaatgttttctttgccatacagccccccttgtttctaattggtggacattttgtttccacagactgacagacttaaccattaggcacattgtgcagaactgcaagcacatagtcgacctgaacttgagtggttgtaaggtaatgtctttgtctgcatttcccagttgacagtatgttttgttccatattttccttgatcaagccggcatctagggagaagctagatgtactttgctatgtctctttccataattattgtgcatagaatagtttccttgtagctgcttattgttaccgaaatgattcctggtgcagtgcaaatgcagagtgtgtgctttgtatatccctttgtactgaactcttccatatctcaactaaaaatcgcaaacaagattactataatcttggagttctgatgtgtttctataaatgaacagttgtggactaccagttacaatcattcctgtcattttcattctttttgtcccattatctgtttcggttcactacgatagtaagatgagtcaagtgcaagagttatctttatgattgcagaatatctcagataaaggtatgcagctagttgctgataattatgaaggactaaagaagttgaacataaccaggtacacttcattcttgatgtgcactgaatgtttattgtgctctttggtgttgctcaaattcagtggttgtgagcaggaaatgaaatttaaacacgtatataccctctattatatatttataggtgcatcaagttgacagacgatggacttcaagaagtgcttcagaaatgttcttctcttgaaagcttgaacctttatgccctgtcaaggtaatattggaaaaagcaaatgatgtttatatgcgaactcgagtgtctattatctatcatcctacttcacatcctgcagttttagcgacaaggtttataagaagataggatctttaactaaccttacatttctagacttatgtggggcccaggtaactatttgtttttatttactttcaactatcaatttatttttaaatttttttgtaataatttaccaatctgtggtttccagaatgtaactgatgatggcctttcatgtatatcaagatgtgtatgtctgacatatctcaatttgtcctggtatgaactacctgtccttttttctctgtgcaatgaaattgtgttgattgatctctgcaatcacttgacaggtgtgtacgtgttactgatgttggggtggtagctatcgcacaaggatgccggtcccttcaattgcttaggtaatgcggtaattttatccaaaatactccatctatttgttgcttattgtacttggatttttttttggcagtttatttggaatagttggtgtaactgatgtctgcctggaggctttgtcaaaacattgctcacgtagtctcacaactcttgatgtaaatggctgtattggtattaaggtgaggattcgagaactatctcttggactttgtttcttttatttattttgtaattttcatgttttcttccagtttcattaattattcctcacttataggttcataacctcataacttaaatcaaagaccttccataaggggttattttttttaccaacgtttatgcattttattggaaaatgtttattttactcaatttttcttcacgcccataggtgactttctatgccaatgtcaataagctatattcagcttttgttgttctaattttggttctcattcatatattactttggttgtttacagaagaggagtcgggatgacctgattcagctgttcccgttgttacggtgcttcaaagtacacagctagttgacctgaatttctgttaagttgtttattctaccagaggtcagttccccctgttaacatttaaaacacaatcgagttactccatgaagaaaaacaatagcaagacagttttgtcgacctagtggctatatgtattttgaatttggtggagatcacaaagattttgtagaacttgtatttgattttcttacagtggtgggaagttgatctgtttgtttctggtcctgatgctttggagtgtgtatatcctgtatgtgaacgcatatattatgtgtgaaccaaaggttttttagggtgtgcttgaggagctcctgttaggacctgtttggggagcttatgtagactgcagcttcttccaggataaaaaacttctccaaatagtacagttttttatccagctgctgagaaactatagttacagaatcttgaagggttttctatcttcttaaaaactggctaccaacaagctgcttctcaatatcttacccccgaaccagtacttagttttccttcatttgcttgctggttcaaagtgttggcttgtcagccactttcgttgtttcttcatgtcaccgatccgcagttctcgccttggcttagtgcgtatacttttggacatttgactaaatctacgtataaatatattcctttcattttaggccgtgtttgaatttcttggtttttacaacatctttcgaggaagtattcaggaactagctcatctcctaagaaataatataagctttgcttaggccgctaaaattatttgtaagcaagctcacgcaaccttacggcatggaaaatacggcatgttgctcaggatagcaaccaaacatgcccctagtatgagacatggggtacatctgtatggctaaaaattttgcatgtataaaaaacggatgaaaaaacacttacattaattcaaaattaagttctaatatttaaaagagtgaattgtaatttgggccacatttattacacgaatttcactttggatcatttttaaaccaatcttttcactttagatgggtaattttgcaattttttcggtttggacaatggcaaacaatttcttcagcacgcatcaacaatctcaatcaaattggtttggatacatcagtgaactttctcatctatatgcaggtcatatgtttaccagaatggagggtagacatgaatagtaaagagagttgggtggtccaaacaaaaaaaaaacccattcaaagtgaaaagattagtttggagtgtgacaaggactaaggtcccgatcttccgttaggtattgataagtcgattgtgcagactcgatgtttatgatccaaaggcttcgatcaggatgacccctcgcaagcactacacaacccttccgttggttatcaaccgtgtgccgaaacacggttgacctcacctataaggctatctcctgcaattgaatcgacgacacaagtaagagagtaaaaaaaagcaatctgaatatatattgcaaatatatgatgaagctcataaactggggttccatgaaccgaactagtggtgaaactgcaatggcaaaaataatctaagcataacctgattctaaatgataacggctattaaataaatatgattagggatgtcctaacgttagcccaagggcatccgccccttgggcttagccctcaacacaattacaaggtccgatgctcaaatcagactcgactattggatgatgtatgtggcttcttttatatatttccgatagatgagaaggaattttgatgtgggaccaaaactatctgaaagtagtctccgtaagctttttaacaagtactcatgggcttcgagattccttcttgatcagcggatatgtccgttcgaagttgatgcggtcaggaggcctaaatccgaatccaaaatatgccgaactttatctattatcttctatggaccaaaatagacatggtgatgtaggagtagacttgggaaggatattgattggtccccaatcaacttcacatccccgcttggtctccctctcttcatccatgcaagtacttctgtcaacgagaacacataaagcttatagtggagtgacatttgtccatatatataatgtaaatcttacatagaaagtatacactatgcactctggttaatggatatagaaggtagctatggtcatattcacggtggtgatgttcttagtggtccaaaaaggaaactttgtaataaaagatagcccaagctaccattcactctatttacaatttgaagaatagtatccggttgataaactgatcgatgagcagacaatggagcatgtcatcatgtattaaatttctaagtgtcttaacgattaaatattgataattagtttttttacgaggtgatgacaattagtttcttgtaacatgtaatatatgttctcaatagctgtaaatatgttccgactttaaaatatgaatttattgtcaaaattgcaagtgccaatatattttaggtttactactaatcatctcttaaaatctactttagttttttaacattaaaatatgccttctaaaaaataaatcaatgtaggagtttatttagtgtcagacgtgtgacaactaaaaatgaaaatccatagtgggcatggttaatggatggtcataatatgctttacgtacgtttcaagaggttttgactgcatctaatgaatcaatgaataatgcattggtccattgaaaagggaaaatcatactcctatgtcctagtcaaattatcataaatttaattaaatttacagggaaaaaattatgatgtcaaatgaatatcattagataagatataatatatatttttatagtgtaattctttgatatagtatatgtactcccccatttttatttctttgtcactactaatggctacacaagtatatcaatgtaagcaatattttctaagtaaaataatcaaaatggccctatgtacatgggtatgcaatataaaagcttctaaatgtacaagctacaacggatttttttttcagaactcattgtacatattttaatatattatcattgtagtacttgtgttatcagttttgagctagtgacctgctgagctagctatattattcttctaactgagcgcgtgtggctatgggagctgaaaagcaaactctcgtctctctgtgtatgttcatgggtcccacatagcaattgggtgatggtgatggcaaattcaccactatcatttaaccggactttactttaattagattcaaaaataaaatagaaattatcaccttggtaattgtgtagtgacaaatatttataaattttagaaattagtgaaaggaatggaggtagtttgacttgtcttttgacaaggaaaattgttttaacttattagggcatgtgcagtgtaccgcggttttaattagggattttaccatctacataaacatatcatcatcaaaactattcgattcacaacacatgagtatttaaagtgggctcaccaaaagaatctttccccaccttttcaactttctccaactcaagccatagtcctccctctcccttccctcacagccatagcatagagtgtgggccacgcctgcgaaacctaatgaggaacttacgaacttgactacgcggtcttcacgaggctccacaggtggaggatgtgacggagaatatttggttcctggtgttcgggctgaaggccacataggagcattagagggtgtttagatccaagcgtgtaaagttttggcgtgtcacatcggatgtacggacacatatttgaagtattaaacgtagattaatagcaaaataaattatagattttacctgcacctgtaaactgcgggacgaatttattaagcctaattaatccgtcattagcatcgcccttacaagttagagcacagggagcgtggtttaaaaagacgcgcactatgcaaaaagtcgttccgtttcttcgcagaagcatcctcgcgccgttcccctttccctcgctttcttctttcttcttcttcacgggagtatttgctttgagctgcggcgcagaggaggccagccagcattcgctacgagcaaagaagcggagaatccagcgaaggcaagcagatccagggtgagctagcagcagcgcatctacctcctcctcctcccgtttacgattaattgctaatgcgaatgcatcctccaaataaacctagctatatatctccctcacctgcaattgtttccacccaaaaacagagctgcgaagaggcggattgatttgtttcggtggcccaacttggcagatcgagagcaagtctggttagctgcgcatcatcatcatcctccctctactgtatgcccactctaatcttgattatatagtgataaattgaattttggtaaataaaattagcacatactagcttggaataaatagtctaagtaattgagtaattttgtttttactttttgacaaaacctgtttatagagccgtggagcaaattattcgtgacaaaaatatggtgaagtagctgaaaataacgggttatctcgctactctgttgcttcctgcaaactgtgcgcagatatgagcactgtttgagttcgatccaactgaccaagcaggcaggaaacaaaaatatgatacccgcaccaatgatttgttttctcggaatgtataaagtatactcgccgattcttctggtttactgcacgcttgcctgatgtcctataccttaatactattaagagtaaattttagaaaactacaactttaatgacaaaactatcaatttgctacaacattagcgatatgtttcagtttgctacaacaatatagcagcatataacgtaaaagttgcaatttgtgataatttcctacgctattgttacagcaaacttatagttgtcactaaagttatagttttctaaatttactctactattaattcatgactgaaaatatgacatcaggcaagcgtgcagttaacctgaagaatcggcgagtatactttatacattccgagaaaacaaatttttagggatttttttatcctcaagagtgtaccggaaggtgccatatttatccgtgcaaattttgattagagattgataattccttgcttaatccaaccacggcagtacaaactcctcgaagtacttactggcatccttatcccttatgcaaccaactaaacttaatccaaacaaacttgtgagttgtgactaaccaaactctgtatggtgtaattggcaacccgcataggatttgaagacgtggctgtggcaccggaattgttactggacttttgtgctccgacgcttatacgtaattcccagcgtgacaaggtgcctcctcgagcacctccagatcactcatttttacatttctccaatatgactataactggttattttatagaacattgtcgaaagataaaaatcactccttacttttcaggttataagatattttgactttggtcaaagtcaaactgcttcaagtttgatcaagtttatagaaaaaaaaggtaataatttcgacccaagataaatttattataaaattatatttagttattaatttaataaaactaatttggtaatgtaaatattactatatttatctataaacttagttaaatttgaaacagtttgactttgatcaaagtcaaaacattttataacctaaaacggagggagtatatatattatgacttcaaccacaagatattacttgtacgttttttactgaatccactttgtccacagggtttgaaggaatctctagactccaatcaccatgagcttatccaagaccattgggttcattagtggtgtcaatgagtgtgtaaatttatttcagtgggctagatctgccatttcatctctccacactagatggagtggcacgcaggatcaaaagcttcaggatgaagtattgcaattgcagagtggcctgcaacgtctcaaggatactcttccagcaatgtatgatcttattgatagagcagagtggagaagccatgaagactgtgtggccaaactccttccaaatctcaaggacgcagtgtacaatgctgatgatcttctcgatgagttcagatggtacgaacaaaaggtggcactggaaggtaatgctgcaagccaatctccttttttggaattctttgattgtgttattcaaggaagattcaataaagtgactgatatcattgaaaggctaaataatgtttctagcgagctggagaagctagggttacgtgaaattccccagcggtttgacaaaacattgaggccagaaactagctctttcccaagtgatagagaaatatacggtcgtgacaatgaactggagaaagtgatggaattgcttagtgtacctaaaaattatactggtgttcattccaaacgcaagagaggaagtaatgatgcatcaacaagcacatcaacatccaaccaagttagtgttcctattttgccgatagttggaattgggggtgttggaaagaccactttggcccaacatatctgcaaccacctattagttaagtctcactttgacccagtaatttggatattcgtctcagatgactttgatgtcaagagattaactaaggaggccatagaatccgcttctggaaaagaggcaaaaaccgatcatttggattctattcagcatgttcttcgtgaaaatgtgaaaaataagaggatcttgataatacttgatgatgtatgggatgatgccttaaaggaaaatgggcagtgttggaagaagttttgttcacctttagcaaatgtatgccagggaagcatgatgttaattaccactagatcttccaaggtttctaatgcactcgggacattggaacccttcacagtgaattgtttgcagaatgatatcttttgggatttcttcaaattatgtgcatttgggtctgacagttcaaacaatgatcctgagttagagtgcattggcagaagcatacttcctaagttaaagggttcacctctagctgcgaaaactcttggacgcttgttaagaatggaccatcacacgacgcattggaaaaatgtacaaaagagtgaactgtgggagttgaaacaagaggagactgacattttgccagctcttcagttgagctacatgtacttacccttacatttgaagagatgcttctcattttgtgctgtgtacccaaaggattataattttgaaaaagatagtttatgtgaaatttgggtagctgaaggctttgtggaacctgaaggggacattccaattctagatacgagcaaaaagtattttgaagaccttgtaagccggtccttctttcaaaaagtttatggtacatatgtaatccatgatttgatgcatgatatggcacaactagtttcaaagcatgattgtttcatcataaaagacacaggcgactttcaaaaagttcctcacaatgttcgccatttgatgatacttgatagcgaaaagtttgattgttccaacttattgagcctatgcaagcacacaaagttgcgtactatactctgtaacaagtctctatggcataaaactttagcttctgtaatggaccattggtgtactgaactttggcagatacgtgtgttttcttgtgccttcctaaaggagataccaaagagtattggaaatttgaaacatcttcgttaccttcaaatctctggatcttgtcatttgaacagtattcctctacagttctgttgcctctacaatttgcagtgttttaatgctttggagtgtgtagttgaaagcttgccttgtgactttgataggttgatcaatctgcggagatataaatcacagggatttgtatacgatcgaatgggacaactgcatctcggtacacattgggaacatgaagttagattgatgaagaatttcaaccaattctatggggatttgaggctatccaatcttggtgcactaagtaaggaccttgcagctgaaatcaaactaaacaggaagagatatattggaagtctgaccctgcaatggtgcctatggatatcacaagagcacaatgagatggaagtgttccaagtcctacatcctcccaccagtcttagatctctgaaactcatgtattatctaggggaatctcttccatgctggtttcaggaacaaaatggttgtaatgagatagcaggagtaattgctaacaacaataatggctgcatttctgttttctcatcgctgacctacctcgacatttctgattgtgaaaagttatcaaacctcaaccagttcctgcaggtagctcatgtaccatccctcgaaagaatacgaatatcaaactgtggaagggtagcatcaactccaaggtttggtgactttcattgcctggaagaactaattctggatcattgcaagatatttgaccattcagaaagcttgtcaataccttccctcaagaagctcgtactacattattctgggaatccaattagcaaaatcgagtgccgctctctcacatctctgtcctttgtgtgtccgagtgtgacgtctattcccctacaagtgtggagtagtaatcttcctgctctgcagaatttagacataaagtggtgtccatctcttacatttattggagaatctgaaccagcggacttcactaacctttctcaccaagtgagcagcagcagcagcagaattagaacattctcatcccttactgtgctaaccattcacggctgcgagaaattgttgacccttgatgatctcctgaaacaagaatatctacctttcatcaagagtattaagatttcctattgtcaagggctactgtccttgcccggtgaaatgtttgggtcttttcctttcctgaatgatttgggcatttggaactgcccaagtctcacttggcagaggggattggttttaccatcatctctcctagagctcaacttaattgattgtggttatttctctacatggcttcctagctgtttggagaacgtcacttccctggttatactgagaataattaaatgtcggggtataacatatattacagatcaaacattgagcagtaatcttgcctcactccaggaattatgcattgaggattgcccagaccttgtttcaatcggtaggggaaagttgatcgcaaaattaaagaaggtgcgtatatttgaaagaaggtagatttcatcagcgtggcttcgctgtttccccatgcgtggtatgtacgtgttctccctaaaaattttcttgttccaccaatttctgtatatgaatttataataaaactgttttaaatatagttttcaactttataatagctattttattcgattgtacccatgaatagtaatcacagaaccattcaaattattcgaagaaatatttcttttactttagcatagcacaaggcattatgtgatctcgtgcctcaaattttgaactacttttccatctatatcatgaggaacatgctggacaacttgttgatggcgatcaatatattttctcctacagagtttcaaagtataatttgacctgcagcaatttctaatacgttggataacaatagaactagaacattatccatgtaattacaaaagcatattcagggtgtaaccttcaccattaatttccattttaatgtatttgtagaacccaataaaaatacaatatagttaaaagtaatttgtagatgaatctatatatgtgcctttaatgcatccgaatccaacctaagctaaatatgttttaaaggtattgatatgtgagtcctcaattgtttgactacatgtatatcggcccatatgtcagtgagcagtactgcacatgcagtactgcaaggaatcttaattgatgtatatccaagggtacacatgtgcagattaatatgtgaaaatgaactctatccccctaaaaaaaaactgaaactgtttctttacctctatggaattatgataaattatttcttgttgtaacttgtgttagcttcgatttatatactgataatgttttgttgtttattaatgaagggtggaatggctggcaagattgggtaatggctgcaggagtacttgcaaagaaggccatgagtcctattttcctccctttgttgtcctgcgatttattatggcaaaacaaattgttgcaaggctgataatggtctctgaaaggttgctctcttgtcctgacagtgcggcatatccgttagcatttcccctttctgttttaaataagttggggagaaaacattcatgtcatttaaaacctctgttaagttgtgtgtttttgtttgattaatctttaatcatgctcggagcctcggacaactatacgttaccaaagttttaatcgcagtggtctactacggatattttctgatgtataccatactagttttctcttgaaatctttccaatatttttgttgtaacaatatgcatatatggttgcgtggtttttgctatggaaccgttgtttcattagtgaaagtacagaatagagattgactcaacacaataattagattgatacaaatatgaagtatatataggcgaacccttcccttgtcttctcaactgacttatagaaacaaaattggtagagatattagaaggatagcaaagaacgaaacaagtggtatatgccaaatttagagatacgctaacatccctatagtcttatcatcgccaaggcaaacattgggattggaacggaactcctataagactgtgctaggttagcccttagtgaaaatatcagcatattgcaacgtcattagcacatgtagaacctgaacctctccaggagtagcatgatgatgaacaaaatgaagatcaatctctacatgctcatccaacacaacatgcccacatccgcctcatcacaaagaaggttgaagccacaggagtgaaacattaccgaccaataagtctaatacatagcttcatgaagataatcacaagttaccggcaaaccgactggcctcaagaataagtgatttgatctcgagaaaccaaagtgctttcatttgcaaaagagcaattcgtgacaattttgcatgtttgtccggggaatgatccaaaaccttcaccactcaaaagaaccttccctcttcatcaagatagacatctcaaaagcctttgattcagtaagctggccttatctcctggaggtcttacaaaaattcagttttgggactaaatggaaaaactggattgcaaacctcctcctcttcctcgatcatcttaaatggtgcacctagggatcacatccaacatgcaaggggtctgccataaggcgatcctctctcactcttcctcttcatcctggccatggagccccaacagaaaatgatcaaggcagcagaagaaacatcagccctctctcccttcaatgccaattacaaaggttcagatgctcatgtcatgtgagtatctttgtcaagccttctgtccatgagctgaaaatccttggtgatattcttcagatcttcgcaggggcttcgggactgcacacaaacatccacaggacagagttatttccaatcacctgcaatgacactgacattacaagttttcccaacaaaactgggatccttcccatgttgctacctgggacttccgctccatgtgcagaagttgtggaagattgatttactcatatacaataaattatatgggtgtaaataggtacaataacttgcaaattgcttattctggtacaataacttggctagttcatgcaaacctaggccaaaccgatccacaagtaaaattaatctaacgttatacataatggtgtgtaattattgctacacatcaaaaatttatactgtattattattattattattattattattattattattattattattattattattattattattattattattattattattattattattattcgcatgatattttcacccagctctaaaaatgcccgatcataaaaatgcactttcgatggagttagtagggactataccatggttatgtaaaataaaattcacccagctctaaaataacgaaattttggctaaattttggtcaaaattcatgaaaaatcataaaatttagaaaaaatcgaaaaaaaaaagaacccattacacttcttcttggtctgttgccacaaaccatggcgaacaccttctgccatcttcaccaccgcggtgcaagagtcaatggtcgagacagtgaagattggacaccacgacatggcaaagatgatccagaattataatcctttggtgccttgatgccttacttaagaaaaaaggggattttctattgcattaggttgagggacgaccatcatgcttgccgtccgccgcaacagcactgtccgaacatcgcgcttatggcttcagttgcgccctccaacagtaatgctctagacggctcggacaggagtgggccaaacaggtcgtttgggctttcaaacgctgagtgctgatgaacaaagcatccaccaaataggaataagttcatccgaggtacctcagcttgtcaacgaatcagattttcgtccttcaaccgaaaaaccgttgaaaaaccagatatagcaggtccctcaactattaaaaccggtgcaaacgaggtcccttggcggtttagaaggcggttttggctgacatggcgccaacgtgactggtttgacttagtcttcgtcccacgtggcatttgacgtggcgcttacgtggcaattcgaacctgaaaaataataaaaactgtggccccacgtgtcagcgacacacacaaaataattaaaaatggtggggcccacgtgggccccacatgtcagcgtcatctcccttcttccctatcccctctctctctccttcctcatcctcttctcttcttccctctcccttctcttcaacttcccttcccggcttcccgcaggcaagcgaggcgggtattggaggtgtaccacggagggccttcggccagacccgccaaaaccagaaacgtgggcagcaagcttagaccggaggcaagcggcgaaggtcgagaagaaaaccatatgggcaaaagccacagggcaaaagctgcggctcggaactacatgggtttcgctaggaatggacctcgccggagggccgcacgggcgaagacggtgaggcgaaagcctcagcacgaaggcacgggcttcgccaaaccaccaaaaccctgccgtgaggaggccaagcgggctgttacgttctcggaggggattcgccaaataaatgggccaagccatttagcccaataggggcccatacatgtaaaggacaatgtatacccccaataatgtccctatcataagggtaaccatataaattcccctgtaaagcctaaaccctagaggagggaacctgtaatagggctataaatagcccctgtaggccatgtaatagggctataaattttcactaagcaatacaattgttctttacttccaactacttttgagagaaccacgcctttcgacgtgacgcagttgtccatttgacaacagtgggcatcgacctcagcgaggcggcgccctaagcaacctcgcgcgccaccgtcgcactccacctttgaaccgccgccttcctccaatggtcaatccccgttggcgaggtccccatcgcgcagtgactcatcaaggtggcaagcaacgtcgtcacaggtcctcgtcgtcgccggtcacctaccagccgctcgacccctggctccaattctccgccgtcccatcaccacctccctctcccgcatcctccccaccttgatgaaccctgagctccactcgagatactcacggttgttgtttggcccgatctttcggtgagttgtagataactacgatttgggagaaacgttgacgacccgactacaaccgtactagacattgttgtgttgcgccttagcgatcgatacacctctccgtgggttgttgatcttgtcggtgcagatcaaccttattcctgtacgcaaatcgaagaaacaagccagaaaaagataaaagcaatctgaattgcagataggaattgaacacaaatgataagttggggttccgtaacgagcaaaccggcgatctaaccgatcacaggattacacagaaaactagcgaagctaaacttttatctaaacaaaaccgcaaaaaccttgaaggggtaccaagctatttatggagatgggaggaccctaggtcgtcctccacctggttggggcgcactccacatgggccccacttgggctggggtcccagatgaagttacaagcccataggcccagtataggtgacacaacaccttgtttctgcgattgcggccaaacaagatggaattcggagatgatgctagatccgttggaaagaggaccccgagagctttccatcaagtactcacggacccaaaacggagctcgtatgcaattttggcggccgtttgaaggcagcaatgtagcgggtggccgaattggattccagaacttggtcaacttgatcttgatgtgaacgacggttgtatctatagtagccatggtcacatcatcctccccttcttcacggaaaaccgtccttggtttttccatatggtgctcttcgtgtagtccatttaaaacaacatgtttcttccaattaaaacaagataaactcgagataattttgttatcaataacatttctctctagcttgcatgttttatccacatgtacaggaggttctaaatctgaatatatgtaaactctatgctccaaatatattcctctataatcagattcaccaaatatatgaaaaatagcactagttggacatggcaaatcagacttagcaaataatttctccttcaaattatcgagctcacaaaaatcatcaaactgaacattacccaaagtatttaaagaagatgtcaattctcgtttctctatttcattagcaatgtaaacaacatgcttaaaatctgcacacaatgaaacactagaaacaatatgttcattcactagttgtggcatggatataagtgaagcattatcacacaactcttctttattacaaggaacatcaagtaaatcaacgtgtgacaaaggcatctcaacagttggttccactaatggttgctcttctctagcatgaaaagtggacatgttcaattcattaacggcacactcaccttgattaattgtagcaccattaagattacctgtggttctctcttcggatactgtaagtgcattagtcttctctttttccttcgagagagatggagaccttgaaggggtaccaagctatttatggagatgggagaccctaggttgtcctccacttggttggggcgcaccccacatgggccccacttgggtcggggtcttagacgaagttacaagcccataggcccagtataggtgacgcattactttttttctgtgattgcggccaaacgagatggaattcagagatggtgctagatctgtttgaaagaggactccgagagctttccatcaagtactcacggacccaaaacggagctcgtatgcaattttggcggccgtttgaaggcagctgtcacgccgagaaattcacgaaccagaatttctaagctgaatgtgcatttaacccctgtccagaaccagccagggtacacaaatgacaattgttgacatacagatccacgtcttacaaaaatataaaagattacaaataaagaggaaaagataaaaatgagctaagcctgaagacttgactcctgcagcgggcgacttcattccacaggcatccttgacgacagcgacgaaaccaacttcttcgagacatctccaactgagaagaacttcaactctggtgtgggggaaaagagagcaagactgagtacaacccactgtactcagcaagtcataccggaagaggaggtatgatgcaagatatatccaagggagtctaaaggtccttctgcataaagctagcatttaaaagcagtagttgaaagcagtaaaacagttatagtaattaatcaatattaaccaatcactgtccaacactacatcacgttgtaacaggcccaaccaaccacatgaacttcaccagttcaatagctaactaggggtgagactaatcatggtgaatctggtcgaccgcccataaccgtgggcacggctattcgaatagttttactctgatcagaggtgtacaactatacccacaagacacagccccacgacacgttcccgtgcgccgacatgccaccacgacataccggaaagaggccgtgacaggacccttcgcataaccccctctaaccaatcgcaccacacctcagggttcgccccgtccccagcaggcaacgggcagcccccctctcgtgccacggtgaatccggaagccgatcaaccgaacaccccggccgacccaactccatcacgcccaccctaacctgggtacgtcggctagaggaaagctacactacaagcccagccgttgcccacgctggcttgtggtaagtacgatgaattcttccaaggtttcccacgaatcgatccttaattgccatgggcacgactagaaaaaccatgcacccacagcccaccatttaatatatttcaattaaccaacaccaaagcggtggcactaatccaaagctatgcctataatcaaagtttatgcattaatgtgatccccctttgtgtactagttgaactaagcatggctaagcatctcataaaccaatatctagtctgattactacccaagttatcaatggcatgaggtgaacaacatatggctaagtaataggacccatcccacatgatattgtaaagataatgcaacatttaatagaaatgcgggacatttgtaaattgggtacaatatgatcaattgtaatgcatgacttgccttgctctcgcactgatgagaccacaacaacgtctttggggaaccgcggatcgacgaaacggccgaaatctacgcgacaaacaaagcacacaagcaaaacaggctataagactactgaaacagaaaacaaaaccatttttaatggattctatacatttttatgaatttactgagacttgaatggacttaaacggagctcggatgaattagttatgaattttagaagattatctgtgtttttactataaaagaaaaaaatcaattatttattgcacaatattgcccagggttgacgtcagcaggggggtgactggtgggtcccaccggcagcggctccaaaggaggggaggtggcgcatggcgagtgggtcccaccaagcggtggctcaaaggggaggggagggaggtgctggctgggctcggctcgacatcaaggccgaccggccggttatggcgagggcggtggcggtgagcagtcgctggcaatggcaaccggcggcgcgggtggcggcggcgtcggccgaaggcgacggcgcatgggcgaagcagcagcgcggcccggcgctaggaagggagggaggagaaacgagggggagggagcgcctcaccgtgagttggccggagtgggggaagacgacggcgtacactggcagcaagcggcggacgacagggtgcgtgggatggacgaggcgaccctcgaccccgcgaggccaatggcggcaacggagcggcacggcgactgcactagcgacggctagcggcggttggaggcggtatgcagcggcgctaggcttggcgtggggagagcggtgcggcggcggtaggcggcaactgagtggcggccgaggtagcccttgtgttggcggagctagaggcggcggtaggtggcgtggcgacggcgctagcggcggcggcgcgcggtcggagtgcggtggcgggcggcggtgcaaggggcgagcggcgcaggcacggtggagagcacgggagaaggcggcgagtagtggaaacgagagagggagctcggggaaggcgttttacaggcgagtgagaagcgggcgaggccgggtggtggccggatttggagaaggagtggcgccggcgacgtggggtggagaaagagagaggggcatattcaaaatcgaatcctgccctctcgggcgcgcgcgcggaggcacgaaggcgtggggaatgtgggcggcgacgtgagcgcggagcacgggcggagtggggcgcgggaagcggggaaagcggcggcgtgggcggcggttgccggcttgggtgcgggcggctggaggtaggggatggccgacaggtgggccccacctgtcggcgtcctagagagaggggaaaggagttgggccagcccggcaaggagggagaggcgcgggaggaaggatgggccgacggcccaagaagagggaaaaaggaggaaaagaaaaggagaaaaagaaaaaggatttcctgggattaaatattgcacatgctcatttttaattggttaaaattatttccaaggctctgaaaattccactaaaaatcctgttaatattttagagcatggggaactcaagaaaaattccaccacaccgtattcgtatattaaatgcatttattaattaaggattcaactctaggttaatttaaaccaacttcttcaggctatttattttatgaatttaaagcaagggaggggaacttcagggcgtgacaaacctactcccttaaacggaatctcgatcccgagattcggaagagctggcgaagaggtgcggatgggcggccttcaattcatcttctctttcccaagtggcctcttcctctgagtggtggctccactgaactttgcaaaatctgatcaccttgtttctggtccttctctcactggtctcaaggatacaaatcggcttctccacatatgtcagatcttcttgaatgtcgatgtgctctgagctagcttgttcctcgggtaccctcaaacacttcttcagttgagacacatgaaacacatcgtggataccaaccatgttagatggaagctcaagctggtaagcaacttcacctctgcgttccaagatcctgtatggtcccacaaagcgtggtgccaattttcctttggtttggaagcggtgtactcccctgagcggagtgacacgaaggtacaaatagtcccctgcttcgaaagtgagttctcttcggcggttatcagcatagcttttctgtcgagattgcgcaattctcagcctttctctgacggttctgactttctcctctgcctcagttagcacttctgtcccaaacaattggcgttctccagtttgatcccaaaacagcggggtgcggcacttccgtccgtacaatgcttcaaatggtgccatttgcaaactggcctgatagctgttattgtaagagaattccgcataaggcagatttttatcccaaactccgccaaagtcaaagtgcacaggctcgcaacatatcttccaatatttgattgactcgctcggtctgaccatcagtttgcggatggtgtaagtattgtgacatgcgaaacaacctagacttcttgttttatattaggtttctcaactcgcacaaagataaatcattttgagcaccgacataaaaaacaatggtgcattgctcctaatagtatgacattcctatattcaatatggtctttaatacaaacgccgagatcagcaaaatgctaagaaaatatacttagcttcattatttccattgccttgtgcttattcccatggccttagcttgacaacggacttctgtcaacacctgactttcatcactacatgatgttcggtcacttccagttctacaagccacttgatgtgcttcaacttatgtcgtccatcatatgccttttattaatcactggatgtggcccatcttgtaactcttcatccgagtctttagatgtcatgatctcacttgagcatcaagaccattttcaattcttgtgacctatttcttccattttcaactcaataaaatcgttagtataaattatcctgttgtcaatcaccacttgctgatgaaccaatcgcatataaattaaatgaataaattgatgagtattaggtaacattgcaagtgtcatctactcacaggtatgctcaaatatgaagatcctaattaaattttagtaaatgacttggatcaatacaagcataactaagatatagaatttgcttggcttgtggattggaagggataggggcggaggtagacattgacatattggtgcacatgcatcagagggccctaacgcttggccgaccacacacggcagcgggtgcacggtcgatcaagcctctatacatatacaaactttatacctatatgtataaactttgtatttatacctatatgtataaaatttttatattaatatgcataaactctatatccatatgtatatacgtataatttttttatgtacatatacacatacgtatattatgtttatgtacaaacgttgtacataaaaaattgtacgcgggccaacaaaaaattggcctgctagataaaataagagagcataaaatagccttctcggattgggctatagattgagtaaaaagcccaaagagaaaatcaggctaacgtgcatcccaaaaataagaaaaggtaaaatcatcaaatgggacaaaaacacatcccctaaaaaattggcccaaaaaccggaggcacgctggcgctgtatggcatattgtttggtgtgttcaggaaaacagattgggaacttctctcccacacacgtaaacaaggttactcactagtgttaactatataaaaacttaaaaaaatagattaatatgaattttaaagcaaattttctatagaatttttttttaaaaaagaaatcacaccgtttagtagttcggaaaacgtgtacgtggaaagtgtggatataaatttaggaacatgcagtaaagaacacacccatagagcgttccagctggtgaccccggctagaggtttagggcggtgctagagccggctggtggagcatagggccaatgggacccaccggtcagtgagggatggaggaatgagctagatgcaaatttatagttttgtgatcacttaggcattttcactaattactgtctctgaattactttggcccaacaattcaaatgtttttactgtgtatagtgtaacttacagtgtgtaactagtgcacaacatatatggcacgtagaggtttgaattgaagcaaagcaatcgtggaaaaattgcaaagagacttcagcagtactgtggcgacttagaggttttgaccagtcgattttacatagctagattagagtataagttatgtaaaaaaattcagttaatagaggaggccaaaaagcgcgtacagtgggggagttagtgtttaattgtgataaaatggcaaagtaggtttggtgtttagatttaatcactgttttaggacagtttgacttatttaattgaggttctaaaccaaatgtcaaaatatttagcaaacattccagtgagctattcagaatgtctagtaagttttagaaaattttctagaaattttagttgtacagaatatatatgaatattttccttaggtgatttagtacatatgaatgtctttatgcaatgctagaaaaattccaacaacactgagaaatgattaacacacaaaggatgcacacttttattagttaggacacttgattcacatattacaagatccgggtatgtcacactgaaattttttaagcacatggaatttcgatactcccataaaagattgtaacaaacaaacctttatgaaaaaagagaatgtagtgaagcaataaacaagtgtatgcgtagcatgtctctactactgaaaaagtggagccatcctactccaccactattgtacttcccccaccacgtaaaaaaaccaccccactcaaaaaacaatatttttcataagacattcaacccaccagaaaaatcagatgtataaaattgaaccccataaaaacattcatccgcattcctcctaataccatccatgtttctcctaatcccattgtaaagcataggcataaactagtaatgataaaaggggagaaacaataatattggggaaacggaagccacaaaaataggagaaacggaacttagtgggaaacggacaccacgttgccctattcgctctgcacggccatgcgtcaattagcatatttgccctaagatatgtagtttgggtattgtgtgaagaaaaaaaatgttttaccgtagaacgtgtttcccaagcaacaactaacacaagatatactcttgattgtaatgctcattgttttcacactacctaaactctgcagggtaaaaagaaattgctagattccaatcaccatggacttattaaaacccgcctttgaggtcattggtggattcaaggagtgcgtacatttttttcattgggcaagatctcaattgagtggtgcgcaggaacaaacacctaaggatttttttttgtctcaatggaatgcctaaggatgaagtggtgcgcaggaaagaggaggccaatgtagcacaaaaaagctaatgggcgatcagtcgcgcgcgtccgactggacacgtgtcgcgcgcggagaggggcagcggacgcgccgcacgagaggaggagggagtagcgagtttttcgttttttccctttttttgtcgtttctattcggttgtttttttctttttttctcttttttttctccgtttttctcgtttcttttcggtttggttttttcatttttttttccggtttctcttgtatttctttttctggttttttaaagatgcatgaatataaagtatgtattcgtatgtatgcaaagtttgtattcgtacatatgcaaggtttgtatacgcgtatgcaaagtttgtatacgcgtatgcaatgatgtattttctagtttttattttattttttaatacgtacgtatataaagtttgtatatatcatatagaaagtttgtacacatcgtatataaaagtttgtacatatcgtatacaaagtttgtatacgtgcatatttttttatacataaaaaatatacatataaatatatatatatttatagtagttagtagtataacaacagtagtagtaatagtagtagtactgctagtagtactgtagtagtactagtactgatcacgcgtcaggggggccgcgacccccaatgtagcacacacatttggtggcaaggagcaattttgctcaccacaaagaaggtccatgtgataggagaaattgctgaaaactagatagagatggcactggtggagaaaccatctttggttggtcaaccgaaatccataatagtcctgatccatttaaaaccgggactaaagatgatctttagtcccgtttggtggctacaacgggcatatgtgatctttagtcccggttggtggctacaacgggcatatgtgatctttagtcccggttggtaacaccaaccgggactaaatatcatctttagtcctggttgtagagatgttagacgttgtcaggacccccgggatctttagtcccggttggtgttaccaaccgagactaaagatcccggtgatctttagctccggttggtaacaccaactggactaaagatcccccctttatatatgcctttttcctcctccagcccgagagcaagcttataaatttctcaaagaaagaggggaggtcatgccaaaatttcttgtgaaatttttttagtgattatatacaaatcggaggtgtctaaaaggttagtaacttcctcctccaatgtttttttgttgttatattacttttggagctatgtttcacacatttttttttctccaaaactttgttgtaagttgatgaaagagaaaatttgtgtggggaagaagaatatatagaaattttattctcatagtttaaaatatgatgaaaattaatcttaaaaaacagaaaacaaactaaattgaaaattaagagaagtacaacattaatattagtttagaacttcaaaaattgttaataagaattgcttgtcgaaagagtttttaattattttatcattactgtttgactgtcattattgtacgaaaatttatttatgtacgattttttttcgtttcatgtagatggatcggcaatggatgtacgctgaccggcggtccaaagagtttatcgagggcgtgcattattttttgagagtggccgaagctaacaagcgtaacggttttatttgttgtccatgcaataagtgtaagaatcagaaggagtattctgcatccaggactattcatttccacatgtttgagtcggggtttatgccaagctataattgttggacatcccacggtgagcaaggggttgaaatggaagaagatgaagcggaggacgagaacattcccgactgggctcagtacgctggatttgaaggaaatcaaacgggcgaggtggacagggatgctggcgataacaacgctgcggatgatcttggtcatatgttacaggacacaaaggaggactgtgaaagtgaaaggaggcccataaattggagcagatgttagaggaccacagaacgtcgttgtacccaggttgtgagcaggggcacaaaaagttggacacaactctggagttcttgcaatggaaggcaaaaaatggtgttagtgacaaggcatttggagatttattgaaactcgtcaagaacattcttccggagggaaacaaattgcccgagacaacgtacgaggctaagaagatagtctgccctctaggactggaagttcaaaagattcacgcatgtccgaatgattgtatcctatatcgcagtgaggagtacgagaacctagaagcatgccctgtttacaaagcactacgatacaagattagacgagaggatccaggtgaagtcgacgggcagccaacaaagaagagaattcctgctaaggtgatgtggtatttccttataataccatggctaaggcgtttgttcaggaacaagaggaatgctagaatgatgcgatggcacgctgaagaacgtcaacaggacgggatgctgagacaccccgccgatggttcgtagtggcgaaacatcgacagaaaatttaaagactttggaaatgatgcacgaaacatacggtttggtttaagtacggatggcatgaatccttttggagagatgagcagcagccatagcacttggcccgttacgatgtgtatttacaacctctctggctatgcatgaagaggaagtacataatgatgccgattattattcaatgccccaagcaacctggtaatgacatcgatgtgtacctaagaccactggtcgaagatcttaaactgttgtggaaaaaggaaggtgtccccgtgtgggacgaggacaaacaggaggagtttaacctacgagcgttgctgttcgtaaccatcaacgattggcctgcacttagcaacctttccgggtagtccaacaaggggtacaagacttgcactcactgtatggatgaaacagaaagtacgtatcttaagcactgtaggaatgttgtgtacatgggtcatcgtcgattcctggttgcaaaccacccggtacggaagaaaggcaagcactttgaacataaggcagaccactgtacgaagcctaaacatcgcagcgggaaaacagtgtttgctatagttaaagatcttaaagtagtgtttggaaatgggtatggaagccagcctatagagagcgaagttggtcacgtggcgatgtggaaaaagaactctatattttaggagttaccctattgggaattcttggacgtccgccacgcaatcgacgtgatgcacctcactaagaacctttgcgtaaaccttcttggcttcctaggtatatatggaaagtcgaaagatacattggaagcacgtaatgatctgaagtatatggaacaacgcggcgaccttcacctggaaccaaaggagaaaggaagccattacttgagtccagccagctacactcttagcaagacagagaaggaaagtatgtttaaatgcttggagagcataaaggtaccgtctggatactccatgaatataaagcgaataataagcacgaaggagaagaagttcacaaacctaaagtctcatgactgtcacgtgttgatgacacaactgctaccagttgtaataaggggtatcctttcaggcaatttccgggcaacaataacaaagctatgtgctttcatgaacgcaatttcgcagaaggtcatcgatccggatagattagaagcccttcagaatgatgtggtgcaatgtcttgtcagttttgagttgatatttccaccttcatttttcaatataatgacgcatctgctttgtcaccttgtcaaagagatcagtattctcgggcctgtgtacctacacaacatgtttcctttcgagaggtacatgggcgttctgaagaagtatgttcataaccatgctcatacagaggcaagcatcgccaaggggtatggaacagaggaggtcatcgaattctgcatagaatttattgaagaccttcgcccaatcggggtacctaaatcacgccatgaagggagactacggggaaaggggactctcggaagaaaagcaataatgacggtagacaacaatttattccgtaaagcccatttcacggttctgcaataatcttcattggtggctccttacatcgaggagcacttagctctatttcgcgccagaaacatcggtaagtccgatgcatggattacacggcatcacatcgatactttccctgcgtggctacgacaatatctcatgggtaacgagatgattaaccaacaactggccttcctggtgaggggacgatctggctcgatcgcgacatttcagggatatgagatcaatgggtacacattctacacgagagcccaagacatgaagagcacaaaccaaaacagcgttgttcgtatcgatgccatgggacatgatggaacaactggcacgtattatggtgccatcgaggacatatgggaacttgactatggtcctctcaagatccctctgttccggtaccaatgggataggttgactggtggaggcgtaacgattgctgacagtgggatgacaacggttgaccttaacaaggttggatacttggacgaatattttgtccttgccaatgatgtaacacaagtattttacgtgaaggacatgtctagcaaaggaaagaagggcaacaagcctgacgagccgaagcaccacgtggttctcccaggcaaaagaaaaatcgtcggagtagaggacaagactgacgaggattacgatcagttggatgggcaaccccctttcacggtgacgattgaccctagcatcctcctatcaaatgaagacaccccttactcacgtagtgatcacaaggagggaacaatagtgaggagaaagtacgtgcggtcaaccgtcaccgccgatgtattgccgtaattattgtgtacacgatgtaaactattatggatgtattgattatccatataaatcaatcgttgtatggcatatgttaattatgtatgattattagaatttttaacaattttaaatcatgcatatgctagttatatgcgataattagaatttttaaaagttttaaatcatgcatgtggcatttacatatgttaattagagtttttaacaattttaaatcatgcatatgctaattatatatgattattagaatttttattaattttaaatcatgcatgtggtatgtacatatgttaattagaatttttaacaatttaatatcatgcatatactaattatatatgattattagaatttttaacaagtttaaatcatatatttgcttattacgtattatccacttaatttactacagacaacaataatttttcgaggtaattgtcattaatttttcgactttaaataattttaatgcattatttactattttagaaacacatatgtaatgttcagtgctattatctgtagtctcggttcttaaccctcaccgggtttaaaaaaaatttagaaatagcgggaaaatatctttagtcccggttggtgagaacaaccgggactaagatcttaaccgggactaaagatatctttactcccggttcgtaagaaaaaccgggactaaagatcttagtcccggttgttctcaccaaccgggagtaaacatatctttagtcagggttgttctcaccaaccgggactaaagatctaggggtatatatattcccgatgtgcgctctcgtcttctccaccaacacttagaagttttttttccctgatctcggcttctccttcgccgccactgcctagggcatccccgtgccgacgccgccgtcgtatctcgccgtcgtctcgcgggcgtcgtcgtcgccgcctccgctgccgctgcatctctggggtgagagccgccgccgcctccttctctctctcgacctcgatctctctctctctctctctctctccaaaccaccgatgccgaccacgacctcgatgcggctgccaccgccgacgacgtcgcgccggtactgccaacgacaccgacgccactgccacgccgctgccccctcctcggcacgccaccgcgatgccacgccaccgccacaccgccgccgtgccacgctgatgccgcgccaccacgccgccgctccgctgccgccacgtgaacgaaacgtgaacttaacgagaacgaacgtgaacgaacgaatgtacgtgaacgaaacgtgaacttaacgtacgttaacgtgaacgaatgtacgtgaacttaacgagaacgtgaaggtgaatgaacgtgaacgaaacatgaacttaacgagaacgcgaacatgaacgaacgtgaacgtgaacgtgaatgaaacgtgaacgaacgtgaatgaaacgttaacgaacgtgaacgaaacgtgaatgaaacgttaacgaacgtgaacgaaacgtgaatgaaacgtgaacgaacgtgaatgaaacgtgaacggtcgccttatacgacactacgtgaaatacaatatatgttactttgcgtttagactaatacattttttttgtatgttgcagaaaagacgtcgtcgtcgttgtccctcaagccggagtggtagctagccctcgaaggaattcgcgcaggcaagtgatgtaaatatatgatggttagatttttaatataattaagactattagatttaatatacgacacttagagcatatatgattatctagggttctaatgtacgacacttagacttagcatatatgattatttgagttctaatatacgacacttagacttagcgtatatgattgttagagttttaatataagattattagatttgtaatataggactaataatataagactattagatttaatatacgacacttatacatagcatatatgattatctagggttctaatgtacgacacttagacttagcatatataattatttgagttctaatatacgacacttagacttagcatatatgattgttagagttttaatataagattattagatttgtaatataggactaataatataagactattagatttacacttagacatagcatatatgattgttagcatatatgattgttaaagcaaatatgacctatagacttagcaaatatttcttgtatgaacagatagctgatcgcgatgaggaacatatactgtacgatacaatcgcagagggaagcagccagtactggaacgaagaagaggggaacgaggatccaaaccagtacttgaacgaggaagggaacgtggagagggatgcggaggggaaccaggaggggaacgtggagagggatgcggaggggaacgaggaggaggctagtggaagtcaaccctccgctggacagaagagggcccgcgaacaacgaggtgccgcgaagaagctagagggttgacacatcataacggaagtggacgaagatggccgacctagtgccccggcagaaacagccaagaactatgtacgacacagcggttgggttatgcgggataacgtgcctgtcagtacggtgtactggcgcaaaacaagggcacgcggagatcatgagagctttgtcccagattcggagaaagagatgctgtggaccacaatactcgagacattcacccttcccgcgggtacagagaacatagtgaaaaggtggactctaaagaaaatggcagaacagtttcagggtttcaagggagatctgtactagaaatacatcctgaaggggcagacaccgaacttcaacacattcccaaagctaagggatccctgggacgagttcgttgcttacaaggcaggacaacaagggcaggcgatgatggaaagaaacaaagaaaatgccgccaagaagaagtaccatcaccacttggggtcaggcggctatagcatcgcgatgccgaagtgggaggagatggaggcaagcttgcttgagagaggtatcgaaccggccactgctaaatggccagatcgatcgaagttctagtactatgctcacggtggaacgctcaacccagttgatggctccctggtcttcagcgatcagatacgcgaggctgcgagtcgactaatggacgcagtggaagcctcttctcagggcacgttccgacccgacagagagaaggacgagctgtcactcgccctgtagactcccgagcatccaagacgaatacgagggaaaggggtgattacttggaatattggattcaaggaggacatccacatgtataggagtcggatgaggagcaagagagataccgaggcgaagattgtagatcttgagtacagggtatcgagctacgagctcagcatgcaagaggaggtggcaaggaaggtggatgaacacatggtcgcacatcggtcccaggatccccagccgtacattcctcctgcaatggtcagcccttcaggcaatcgtagcagttgtgccttaacgaggcaagtaggatcacagagcatggacgccatgcaaacccaggacgaaaccacctgccccgttgatgacatcactcagcggacaccatgtgagctgcatattcccctcaagaacttgtcaataaaggtaagctcatagtttatagattttagaattgtccattccgcaagttgctgcttatatatgttgattactaataaataacctctcaccacatgaaggtggcgtcgggcatggccatcccaacggacccttcagggacttaccactgcaggccgattccagcaggatactccaaggtcgaagttgagttggtggaagccgcgtacgaggacctcgagttggactaccctggaggagacggtgagacgcatctacgagacacaagccacgccattatactatggcgcaagcggtacatcatcctccctaggtgtcacaccctaaaaatcctaaatatataaattgttgtttaattggaattattagaaatgattttaaaagccttgaaaagaagatctaattttaaataataaatcccaatataaaatggggccagataaaatttcattaaatactttgcttaactctataattcctagatttttctaggatttatttgagctaaggaagtatttttaataaatggaattgcatttcatgaataatttaaattagaaaaggttttaaaagtctcttttggctttgggccgaaagtcggcccaaaaccttctctctaactttcctcggcccaagccggcccagtccgcccgcagcagccgtgtgcgagcgccctcggacgctgacaggtggggcccgcctgtcaggtcgtcgtctacctccggccgcccgccgcccgagccctagcgccgcgccaccgccatctccttccaaatccggccgcccctttccgtttccgatgaaattgattgaggggaaaggatccccgtgatccactctaccttttcccttttggaaacatcgtctaaatcgctttggaaattcgcggattcgatctcgaatcggattcgtctctctctcccgaaccttaatctttccatcgtgttgccggtcgccgtgggccttcgccgcctctccctagtccctatataagcacccccaggtcctctgctacccgtcgccaccctcgccttcgtctctcgtcgccggtagagccctagccccgtgagacctcgcgccgccgtcgtcgccgccgctccagccgtgcgtcgccatagctccagtcgtcgccgtcgctcgggaaggtcgccgtcacgtcgccgtcctcgtccgccccttcgccgtcgttgtcaaccgccggagcaccgccgtcgtcgtcaagccgaaggttgccgccgcttcttcctcgacgccgtcgccgtccattgatcttccgccgccgctttggtcaccggtgagttcgccgtgccgtccgctacccgtaggtgccctccgttcgcgctgtcgtgccgtcgttcaccggcgagcatgcgcgcccgagccgccgccggtgatgacgtcatcgccgacgccatcgttgccatccgtcgtagaccggtcgtagaccgttagatcttggccgtccgttgtggataggatcgatctcggccgttcgtttccgtgagccgccgccgtgcacccggttcaccgcgaaccctagccgctgacgcaataattcccttttccttttcaaaaataattcattattgcgtcataattcaattaaaacccatataagtgttttaatccgatttaatctttaaaaattcataactaattcatcttagctcggatttagttggttcaagtctctaaatttttctaaaattgagatctacatgttaaaaatatccacttgtactgttcatgcttgtttatgtgctgttttggtgtttttgctcttttctgtttagattccgacgtttctggagagttcgttttcgcaggagaagaatttgaaggcttccaaggccagcaaggcaagtcacacagatcccaaacaaccctttgagcatgttgatcccgtttaaagctattgtttctattcaactattgcatttattttcgaatgtcattgagtggaattaacctattgtttgttatagcccttttgttcttgattactttattccttgataccttgggttattataacttgactagttgggctttatatattggttcagctagatattagatatgattgcttagccatgcttagaaacattagcacactattgggataacttataattcactattatttaatgatggcttgatgatagctcacgatggtcaatcgtgattggttaattaattaaactgccaactaaaacttgctaatggtgggttgtgagcacatggttttgatggtcgtgctcatgacaattaaggaccggttcacgagtttcggttgtgaaacattaaccgtgccaaccacaagccagcgtgggcaacggctttaccttttgtatagcatggttcattgcggagcaccagactgagaagtggcggagataagcccacgggggtcgctggggagtccatgccttgtttataagggggtgattatgatccaggaacggtgcactgtggtggattgtgttgtgcgaggggtactatcacagctcctttctgaggtaccgtggtggtatcgaggcgcatggtgacatgttgtggggctgtgtcttgtggatacagtggtacacctctggccagagtaaaactattcgaatagccgtgcccgcggttatgggcgggtctaacaatgtctttcgtgattagtttcacacttctcatcataataaaagatgctataactggtaataatttgattagctcctggtttggaatggtatattcttggtgtggagatagaactgtgcagccgggatggttgttcagaatggttgggcctatgcaacagggtatgttgtatagcgttggattaatattgtttaattattacctaactgttttattaaattctgaaatgtttgttaaatgttgtttatgtaaatgaaaccctactatgccatcctttgttatcctgtgcacttgtatatctgctgtgtggcttgctgagtatgtcatatactcaccttgcaatcatttatcagaggaggagttctacagtgatgctgatggtgtggatgattaggcgtagccctggtcaagctgcctgtggagaggagtcgcctgcgctgtttcttattttttcgctgcttagatctttattgattgagaggaactatctacctctgtaatgacattttattcgcttattaattagagtaataattgtactctattatcaatttgttattgtgtgcctcggctgattcctggacgagggttcacacacatgtaagcgtttggaattttggatagaaattccgggcgtgacactgggcgacaagcagcgtctcgtgcaccatctcctccgtctccgccatctcctcctcaggcacctgcaccgtctctcctcatgctccagcaccgtctccaccttaggctcttgcaccgactcctcctcaggctcctacaccgactcatccgcaagctcctcatccggcaccttccaagtcaagggccccccaagctccaccgcctacccccacaagggccacgaagaaggcgaaagttgacgccgccaaaaacaaggacccggggtacgattgcacgcaagaggagcttgacgcttatgtggcatcagaagtcaggaaacaattgaagcctcgaagtccagaaaagaagattcctatagacccaagtgtcaggaacttctttaggggtatgtttgcacctgccaaggaggccataaagctatcggactatgagcgaacacttaagaaagcatcttctagaaagtccaaaccagtccctcagcttggagagcaaccaaaccaggagattgagccgttggtgaccggtgaagaatttggaatacaagattttattaatgacaccgggctaactacggatcaattgctacgaggcgcatcaatcgaaaaggcggaagtgaaatacatgtacgaactcggtaaaccgcttgccaagcctgagcagctgcagtccctaccgacacaaatgtataaattccatcaactgtacatggagatgagcgccaccggtagagagatgatcggagcgagtatcagggacacggacttcttgcaaggagaagatattctctggatcaatttcaagggtatctacgaactataccagctggacgctctcgacgtctctattatgagttgttggactttgtaagtatcgttcagttagatttcttattacgtttcctttaattaattaggtccttgtatataagtacaccatatataatatatacttccttttatcgttgtagaatggagattcaaagggcccgacggcggggggtttttgatactggattcatcgaccctcggaaagtaaacgtcgcaatgctcgaccagtatccgcaagccacagaggacaatctcgtccatatcctgaaggcgcaatattacaagacagagttagtttttactgtcttcctaccaaatttcattcccgtatgaacatgctaagtgtttcatatgtaatccatccgacgcacattgcagattccactgggtccttttactcttcgacttggaggcctgcgtagtcaatgtatatgactcaatggataaaaaaaagtctacgtttgaccaggtttttgaacttatacacaggtacagtcataagttccaacgttaattacgaatcttgttataattaattgctactacgaatcatagctttaaactccatgtagggcttggtatcggttccatcatttggtccgcggcaaatggagagaaagacttaggcggaagtttaactttcatgtgagtacacatgctctacatttatattgaatctccaattcaaatacaagtgtatattaattagatctctcgtcgtttgtcatttatatatagtgcgcaaagcaagaccagggaactaacttgtgcggctactatgtgagcgagtattgccactgccttgcagaccaaatcatcaacacaagagagctcgatgtacgtacaaataaattgaaaatttcattgcgtacgtatcgatttgttgtttactaattaatttcatacgttcataggatattcgcttgagggataacctcacacacaaggaatttatcgcggcggttcaagaacaactcatgggattcatcaacgaacaaatccttgatcccgagcgtgaattctactacgacggaaatacaattcataggtcgttagcttctgagataacgactactactacgtcgaagtcgtagctagctaggacatcataatgaattataattaatacatgtctatttttctatatgcatgtacacatttttactttagtgtaaatatatattttggtcatatatatatgcacataaaatgttaaatgctttaatatatatatacatatgcatttgcataacatatatgtataaatacatatatattatgcatgtatatgtattgaaacatatataaatataatatatatatatatatatatatattataaatatatatgtattgaaacatatatatgcatggtttatatattaaaccatgcagcaacagggccatgcaaataaaaaaaaaggtcagctcgatctttagtctcggttatttcacccaggactaaagatagcgatctttagtcccggattggtagtccttgtttgaaaaccgggactaaagaggggttacgaaccgggactacaaacggtttctccaccagtgtgggaagttaaaaacagaaaattattgtaaaaaataagttgaacgataaagattgaaaagactaggacgtctttggattttcccttccatctttcaccgatacatcccttcctatcgccaccacacccacctgcttcccgtgatgcctcctcctggtcttgagtgtgaggacggccttctcgtcaccgtctagcttcctcacgaattatggtttttcaccgtcgtcctcaagtccagagactttactacgctacactagtggatgccattttctgtctataatttaccgtttaaaactcaacggtggatactaattggttagaaattgaatgggtaccttccaagcactgtcgtttaattgatcgatgaagagtgtgtttagttatttggatgtaaagtttttgaactatacggacacacatttgaagtattaaacgtagattaataacaaaacaaattacagattccacctgtaaactgtgagacaaatttatgaagcctaattaatccatcattagcaatgtttactgtagcattacattgtcaaatcatggcataattaggctcaaaagatccgtctcgcaatttacgtgcaaactatgcaattagtttttttcccacatttaatgctccatgtatgtgtctaaacatttgatgtaaagtttttggccaaaattttttgcgatctaaacaaggcctatgttctcttgttgggtatatgatttaacacaccctctctataatatgcaatggtagttgtgttttactatcaaaccgctggtggaattaaagcgtgcaacaatagaaggtgagaggagaccaatgtagacacacacctttggtggcaaggagcaattttgctcaccgacaaagaaggtccatgtgataggagaaattgttgaaaactagatagagatgggaagttaaaaagagaaaactattgtaaaaaataagttgaacgataaagattgaaaagtgtaaaatcaaaggtgttttcgattattattctataatgaacaattggcattggagattattggttatgatatttggaatttatttgcgaagtggtattggagatgattggatttcataagtgatcttcaagtactgctggatatgggtccggtcggaccgggcatgtgctgctggtcagaccggcgcagcccgcggtctgaccgccgactctgtgtcagtttcggtttcgggttatttgtttggatatccgtgattgtttcatgtttatggcttctagatggatactatgcgtatgtaatactgttgtttgctaagaatgagtcaagttggggatagcttggtctcggaatatggtttctttgtttgttctatgtgtaggtgactcgagattccgggagagtatttgcggtgatggaccgggagtcggcttagggataaaacgatgtccatggtggtcagagatcatgtgggatactaaggctagagttcaatgtacgtggttggtgaagattccatatgacatacgatggaggtattgtgtgcgtatgggatgcggagtcgaatttgaaaagagtccaaatttggtatgattggttatgtaaagtttgtttcttgtactagagggtttcctagggtgattaggacttctagtatgagtttggttcgtggctttaggctgcctaccttgggtataaatagagagggagcgtgaggctttctagtattgcttttgagagcaattgagttgatagtcgagttagggtttcgagtttagtcgagatatttgtaaggagtgctgttggtgcactttgtaaacacatagagaattaataaagtcgtcatccactttaagagttcttcaatttgtgtttcaccgggtttcgacggtcagaccggcggcgcaccggcggtcagaccggcggctaggggcggttagaccgacggatgacctgcggtcagaccggcggtggcgacaggagcaggcaggcaatttcggcggttcgaccgatcgatcagaccgacggcaaccaggtggtcagactggtgcatacacttcggtcagaccacgatccgtcgaatttgagggtaacgtttattttcgctaaaagttttggttttcggttataccaaccattcacccccctctggttggcttagttcttgtgatcgatcctacaagtggtattagagccttgttttcttctttggatttttaccgatctagagtttttgccatggctgttaggttttcaactaagcctcatgttttcgatggaacggatttttctcattggtgtagtaggatgcaattttacattatggctgaggattatgatatttggagaaaagtttattatccttatgtgattcctgaacaaattaatactgctgctttaaaaactgagtttgaataaaattgcaaggctcgcaatattcttttgagtgggatttctcgttcggattatgatcgtgttgctcatcttcaaactgcccatgagatttggattgctttgagtaattttcatcaaggaactaataacattaaagaacttcatcaagatcttttgaaaaaggagtatattaaatttgagatgaaacctggagaagctttggatgactatttgtctaggtttaataaaattttgagtgatcttagatctgtcgattcttcttatgatgttaattatacacaatctaagatttcttgccactttttgaatggtcttgacatgtctatttgggagatgaaagttacatctattcaggagtccgttgacatgtctactttgactttggattcgctttaagcaaaattgaaaacacataagatgaatattctttcttgtaaagttgattctaagtcgaatgctttggtttctttctcaacttctttggatgttgattcttcttcatcaaagtcttccgcatttgctttgtttaatgccatgtccgatgatcaactcgaacaattcgaggaggaggacttggttttgttatctaacagactttctcgagctgtgactaatgttaggtacaggaaaagaggtggaccaaatcgttgctttgaatgtggttctaggatcactttcgttcgtgatgtcctaagcttgggagagcgaggagggaagataatggtgatgagaagaccaacgacaacaagccgaagggtacattcaaagggaggaagatgaaggagactctcaagaaggcttttgatcaagtctacgccgcatttgagccgctaagcgatgtagatggtgatagtggcgatgaagataagggaaagaacatctccggtgtttgcttcatggcgcgtggtgaatcggattcatagtgtgaagacaatgaagtacgtgtttttgaggaagctattcttattttaagtgagaaaaataagaagtgtgagaagatgtatagaaaacaaaaatttatcatttagtctcttaattctgaatttctagattaaaatctcttattcctaatgatgagtataaaactcctagaaaattttgggcggaggcggttaacaccacatgctatatttcaaatcgggttttcttgagatcaaaacttggaaaaacttcttatgagcttcgatttggacatcaacccaaagtttcacatttacgtgtttttggttgcaaatgctttgtcttgaaatatggaaatttggataagtttgaggcacgctctaccgatggaatgtttcttggttatcccacacactctagtaactatcatgtacttattttggagactaacaaaatcgttgagacttgcaaagtttcttttgatgaggctagtccaggtactagaccagatattgcaagtacattgtcacatgttcagggggaggatggtcgtatttttgaagacgagagcgatgacgacgacgacgaggtcagctcggccggtcagacagggcgccaagccgatcagaccgccggcacacctccggtcagatcgccttaggatgagcggtcagaccggccatgttcgtcgggatcgggttctgttgatgctgatcgagatgtacctcgagaggctacaacttcgaccagtgaaggtacagaatgtgaaacaacttcagaagtcactgctcctttgcatattcaacgatgacatccgccagaacaaatcattgttaatttaggtgagcagactactaggtctaaggtaacgactcatgatatttgtgcgaattctgcatttgttacttcttttgaacccaaagatctgtcacatgcattaactgatgaatcgtgaattaacgccatacatgaaaaacttataaattttgagtgaaacaaagtttggactttagttgaaccaccttctggacataatattattggaaccaagtggattttcaaaaataaacaaaatgaggatggtttgattgtgagaaataaagctagacttgttgctcaaggttttactcaagtggagggtttgggttttgatgaaacttttactcctgttgctagaattgaggcaattagacttttgttggcttttgctacatcaaaaggttttaaattgtatcaaatggatgtgaaaagtgctttttaaaatggtttttatataggaggaagtttatgtcgaacaaccaccaggttttgaaaatcctgattttcctaaccacgtttttaaattgtcgaaagctttgtatggtttgaaacaagcacctagagtatggtatgatatgcttaagaactttttgcttgcgaaaagttttacaatgggaaaggttgacaaaacgccttttgttcttaagtatggtgataatcaactgtttgttcagatttatgtggatgatattatctttagttgttcaactcacgctttggttgtggagtttgctgaaactatgcaatttgagatgagcatgatgggtgagttatcgtactttttgggattgcaaattaagcaaacacctcaaggtacatttgtgcatcaaacgaagtacacgaaggatcttttgagacggttcaagatggagaattgcaagctaatttcaacaccaattagttctacagctgtgttggatccggatgaagatggtgaagttgttgatcaaaaggagtatagaagtatgattggatcgttgttgtatttaactgtttctaggccagacatacaatttgctctgtgtttgtgtgcgcgctttcaagcttctcctcgtgcttcacatcgtcaagcggtcaagcgaataatgaggtatttgaatcatacacttgagtttggaatttggtattctacttcatcttctatatgcttgagtggatatttcgatgctgattttagtggttgtagaattgataggaaaagtactagtggaacttgccattttcttggtgcatcattgattgcatggtcttctaggaaacaatatagtgttgctcaatcaactgctgaatctgaatatgttgctgctgctagttgttgttcacagattctttggcttttatcgactttgaaagattatggtcttacttttgataaagtacttctcttttgtgataatactagttgtcacgtcctgataaattcatcccgaaataaaaatcatttcctaaaaggaataatagaattaattaaaatttgaaaagaaattggataatactaaaatgtgtacaagaaaaattcgaatgtggcccggagaattttttttggattctccgtggtctaaaaagagcccttaaattttacttgaattttcagagcaccggaaatattattaagcaacaaaaacaattatcagagtttattaaaaagaaaaacctaaaattaatccacctcctccctttgggccatgcctggcccaaagtcctcccactctctcccagcccgcggccaaagtcctccctttctccctctctctctccctctccttctctccctccttctcttgggcctcccctccccctcccggcccactccctcctccttcctctctcccccgggccgcctctccctcccctcctcctgggccggccgcccggcccaagccgcagcgccctcctgccctagccgcgtgcgcacgcgcgccgcacgcgcgctgatcgcgagaccgcgtgggtcccactcccggtcgtcgtcctcctccagccgcacggcctcctcctctctctcccgtgaaccctagccatttcctccctcaaatccgcttgattcaattggctaattccaaaattgattaggggggattaatacactttccttcctctcccttgtccccctaatctccccatcaatcgtgcactattttgaccggaacggctgcaccattcatggccgccttccatggccgccggccgccatttccgccgccgttccccgctcctcccttgctcggctcgcttccctccgctataaaatggaacccactctttgcgttctatcgttttagcctcctcccgagcctccccgtggctgcaccgcctctccccgcctcatccctctctctcatgtgccgccggccgcctccagccatctccccctcctctcccgtgcgccagcaggccgtgccgtcactatcctcggcgtcacagccgcctcctctcccccggtcagccctccgtttcacggggaaaccactggaggtgcgcccccaccggcaaccagtggcatcgccgccactgcaccgcctcccgccggctgttcgccgtgcctaaagcgttggccgacgctgctgtcccctccctcggcacggtgacgtcgccatcaacctcggccactccccggtttcgcctggaagccgccgcacgtcgctgccgcgccggcttctccatcctcgtcgtcgacgtctccttcggccgcccgttccaccccgcttgtgcaccggccaacgttgccaccaccacctccgacatcacagcggcgagccggcgatgtcgtccttggcttcgcctccctttcagctgaacctgccggcgttcgtcgtcgcctcctcaccggttcccatcgtcgtcctcccgtcgttcccggtagtcgtggtgttcgtccctccgtcaagccgtgctgttcgtcgcccgcctttcgtcaaggttgctgcagccccatcgtcgtcttcgtcctcggctccgcgtcgtcaagcgttgcgccggccgtgtctcgccttcgtccaaggatcgccgccgaagtcgttccctcgccgttcgcttccatcgtccccaagccgtctccgccgcgcccgttcgtcgtcgtcgttcccatgcctcgttgtgtggtggtaacggtctctcttctcgctgccccatcctcgtcctttcggtgttgccccatgcccgttgtgcggttgtcgaccccggtacccgtgtaccggtgtcggtagtcgatcgtgtgtgcgtgtggtgacctgttagtgtgcccgctcggtagccgcgtggtttccacgtgtgcagcccgcgtggtgtctagtggagtccgtttgtcagccacttgcctcggttgacacacggtgtccgctttcgtcgacccgtggatcgtctctgtgtactcggtctaccgcggtcctttaggttgacatgtggggtctgcatgtcaacagcgcagccttcctgtcttttccaggctagcgcttacacatgttttatagttgtaaaacctaattacaataatccataaatctccatataacagcattaaacttcggatgaccatgtcttggtcatacgaaccccgaatcgacccgttcaagtctcttaatgtttgttataacctaaagaactctgtgctttctttttatgtacagctattgcttctttataggcttgtagctttgcttgtgtgcttcgcgtagcttctgtcgttctggaggtttctgaagcgtggttcgcggtcgtcgccgaaggttcggaaggccgttctctctgagcaaggcaagtcacatcacccttgagcatattgaatcccagtttataaaattattttgatttaaattattgcattaccgctttacttaaattcccgcgttatcactgttttatttagccatgcctatttacctttgttatgaccttattattattgctattgttattattaccttgttcaccctaggataaacaaaaccaaaactagtgggtactctattaacggttccactagtatgaatttaggtaaatgcttcgctgattaattaggcaacactaggtggttttataactttaaactttgggagttctcatatgatttggacactgtggaatggttggcttgtgatggaattgaacacacacctcccccctctattcaaaactcccaaaatggttttaggttgggctcgaggtgcatggttctgctagtagcacctcggccactataaggaccggtcttcgggcctctattgcaaagcactaccgtactaaccacatgtctaatgggtaaggcttaactcggtgctcagtctagtcctagcaagagtacacggatggagatggacgaagtcggggctcaatggacatctctagggcaaatgaaggctacacgggctgcggctcggtagtcgagatgtcatggcacagggctggtgtcctactgctaggggctcaatcttacctacctgtctcgggattccggccgtaggcgaggttgtgtcggtgcttttatcacggctaggatgggtaaaggggttatgtcacatcctttactacgggttccacggccgtggaatgcggagtaaagatgtgtcttgtgggtaaagatgtacacctctgatcagagtataatctattcgaatagccgcgccctcggttatgggcaagcctagcaatgtacccaagttagtggtttaattcttaaaacttgcttaacaactaaaatgtggaatggttggcctggattggcttgggacgagctgggatctgggtctggttgccagttcggtctgaatcatcgtaggccttaggttaaggcaggttcgtgtgggttcatggccttgattaataatattgtgtagccctaggattgtgcttgtaaaatagctttgagcaactaagtgtcttttaaatgctgttactgcaaaacctaacccctattattatccccttgtacccccttgcattaatcatgcatctgccggtgtggcttgctgagtacggtggttgtactcattcttgctctatctttccccccttcagtaagagaagctttagagaagaagtcctacgtggagtcctggcttataccccagttgaagatggagccgtaggcccgctagtccgctgctgtttatttttgtttgtcaggcctggagtgcctttgtaataatgtaaatattatcgatataataaagatgtgccttttgtatcatgtttgtgtggtgtacaccggcttttcctgggacggggattaatacactagcattctggaaaaggtatttttctgggcgcgacactagtgctataaatattactaagaatcctgttcaacactcacgcacaaagcacattgatattcgcttttactttttgagggatcatgttgagaagggagatgttgaattgtagtttttggacacaaagttgcaacttgctgatattttcactaaacctttggattctaatcgctttgcttttttttatggtgaattgggaataattcatcctttttggcatggtttgagggggagttttgcacctcatggttttatcaagcaaaaatatgacaatgagaaaaattgatataagagagctttgtgttatatatatggtattttcttgtgcatgctagcaatactatgaaggtttatttgtctccagcatagcttgtatgtgttctatttttttatgagacttagattttgcttttaagggagttgatgcatgacacttaaattctatacttgaattaagcaaatatgcaatgttgatgctagcatatggtttgatctataaatgatctatatatatggtttattgaattgttattcctcaaatagcttgtagttgcttattgtgcaaagagaataaaaatatgaaaaaaatgaatatcgaatccatggaaacagtcttgacgacaaggacgtattcgatgtgagcaaaataatgggtgccgaatccctggaaacagtctcgacgacagggacgtacccggaataaaagagaaaaatatgagaaaaaggctcaagaaaaatattaaaaaattctcttggttgttttgtgcaaaagctaatttgagaaagagtgataaatgcaataggtatatatgtttagtgtttatctttcaacctatatgcttgttaagatgttgcattataaatcgtatgaaatcatgatttttaattgttgattcaagcttaattgtaaaatcgttgggtcatgattatactttaatgcatgcttattatattatagatgggttcatcttctttttattgcaacacatgacatgatatgctatatgtatgctaagctcttgaacattaatgaatataattcctatacttgatgaaatcattgtcaaaagggggagaagagaagaatttttggaaagttgagagaatgttgtttttggttcaattgggaatttctttcttttcaaaagtgagagaagttttcctttggaattccgagcgcgatgtgtacgtttgtacgaagtgcgctttttaccactttcgtttttatttttccaaacaccgaaacatttttgatgggtttgccaatgtgttcatcaagggggagattgtgaaatcaaaggtgttttttattattattctgtgatgaacaattggcattggagattattggttttcatatttagaatttatttgcgaagtggttttggagatgattggatttcacaggtgatctacaggtactgctggatttgggtccggttggaccgggcatgtgctgctggtcagaccggcgtgtattgcgcggtcagaccggcgcagcccgcggtctgaccggccgactctgtcggtttcggtttcgggttatttgtttggatatccgtgattgtttcatgtttatggcttctagatggatattatgcgtatgtaatactgttgtttgctaacaatgagccaagttgaggatagcttggtctcggaatatggtttctttatttgttctatgtgtaggtgactcgagatgtcgggagagtatttgcggtgatggaccgggagtcggcttggggataaaacgacgtccatggtggtcagagatcatgtgggatactaaggctagagttcaatgcacgtggttggtgaagattccatatgacatacgatggaggtattgtgtgcgtatgggatgcggagtcgaatttcaaaggagtccaaatttggtatgattggttatgtaaagtttgtttcttgtactagagggttttctagggtgattaggacttctagtatgagtttggttcgtggctttaggctgcctaccttgggtataaatagagagggagcgtgaggctttctagtattgcttttgagagcaattgagttgatagtcgagttagagtttcgagtttagtcgagatttttgtaaggagtgctattagtgcactttgtaaacacagagagaatcaataaagtcgtcatccactttaagagttcttcaatttgtgtttcaccaggtttcgacggtctaaccggcggcgcaccggcggtcagaccggcggctaggggcggttagaccgacggatgacctgcggtcagaccagcagcggcgacaggagcaggcaggcaatttcggcggttcgaccgatcgatctacatcggtcagaccgacggcaaccaggcggtcagaccggcgcatacacttcgctcagaccacgattcgtcgaatttgagggtaacttttagctaaaagttttggtttttgggtataccaaccattcacctccctggttggcttagttcttgtgattcgatcttaaaaaagactggacttatttggatttaccttacttctttcacctattcatcccttcctattgccaccacacctgcccgctttccgagatgcctcctcctgatcttgagggtgaggacgaccttctcggcttttccccaccgtccagcttcctcacgaattctgggttttcaccgtcatcctcaagtcgagagacttcactacactacactagtggatgccattttctgtctctaatttaccgtttacaaatcaacggtggataataattggttagaaattgctttgggtacctttcaagcactgtcgtttaaacgatcgatgaactctattttggcacgagttgaaactttatgcatggcaagttcaagtcgtctcgtttcttggagtgaagcttcctcgcggtgaaactgcttgcggtgaaggcgtaaagccttttcctcacacgcgcacggcgccttcctccctagcttccttcttactactagtagcttgagagtttgagaagcagagaggccagggttggctacgagcctacttagcggccgaaaatttgttccaattagacaagcagagagcagaatcatcatctcccgccacggtaaccctcccctcctcctcccgtttgtttgtttacgccttaactaattgctagtagtagtacgtctcatgactcgtaatctccctaaactgatctgaaatgttcgacaggatatatacaggggggcctgtctgcctgcatgttttggttgacatgatcttggacatgagagagccgggttattgatttgttttggtggccgccgggcccaacctggcatcaacgctctcccttctattgtatgccctctctccaatcttcttatttcttcatcacttgctgctctgttacattgcttcgtgcaactgaccaggcagaaaacaaaaaccaagatgatcgtatggtcgtaccaatgaaactgttggcttctaatgtacgaagtacacttgctgattctttttctttggttaactgcacgcttgcttgatctccttcactaaaagaactgtacgcttgttcttttgcccccaaagggagttgctatccctgctggattaccttaacactattactcctcacttcttatagtttactcttggttaatttgcaggatagtttttttttttagatttttttctgcaccttaagggtgtaccacaaattaatactagaattttgtggtaccatcaggtgcctcctcgagggccataaaatttcagcctgttttttttgttttctttttggtacaagtaaaaccagttattctacagagcactacagaaaaataaaaacttcagctttattatatatgacttcaatcacaatatatacatctatgtttttcactaaattaatccactctattcacagggcttaaaggaatccccagactccaatcaccatgagcttatccaagaccattgggttcattagtggcatcaatgagtgtgtaaatttatttcaatgggctacatctgctctttccactctccactctcgatggagtggaaaacagcagcaaaagcttcagggtgaattattgcagttgcagagtagccttcaacgtcttagggatactcttcctgcaaattatgatctcattgatcgagcagagtggaggatccataaacactgtgtggccaatctccttccaaatataaaggatgcagtgtacaatgctgatgaccttcttgatgagtttagatggtatgaacaaaaggtagcactggaaagtaatgcaaaccaatctccttttatggacttcttcaataatatgattcaaggaagcttcaataaagtgaatgatatcatggaaaggctggataatatttcaagtcagttggagaggatgggattgcatgaaattccccaacgatttgacaaatcacttaggccagagactagctctttcccaaatgagagaaaaatatttggtcgtgacaaggaactgaagaaagttatggaattgctcggtgtaccgataaatctcaccagggcctgttacaagcgtaagagaaatagtagcacggctgatgcatcaatgagcacatcagaaaagtcaagaatatcatgtttttctgtgttgccaattgttggaattgggggtgttggaaagaccactttggctcaacatatatgcaatcatccacaagtgaagtcccatttcgacctaataatttggacatgcgtctcagacgattttgatgcaacaaggttaattaaagaggcaatacaatcctcttcaggaaaagaggcaactactgataatttgaattgtctgcaacttggtctttctaacattgtgaacaacaaaaggttcttaattatacttgatgacgtctgggatgatgccttgaaggagaatgggcagtgttgggagaggctttgtttacctttagaaaatgggctacagggaagtatggttttggtcaccaccagatcttcaaaagttgctgatggagtgagcacaatggacccatttacattggatggtttaaaggatgacatattctgggatttcttcaaactgtgtgcttttgggtctcagagttctaacaatgatcctgatctagaggacattggtagaggaatacttcctaagttgaagggttctcctttagcagccaaaacacttggacgcctgttaaggatgaaccttcaaattccatactggaataatatactattgagtgaactgtgggatttgaaacaagaggaaactgacattttgcccgcccttagattgagttacatgtacttaccattccatttgaagagatgcttctcattctgtgctgtgtacccgaaagatcataaatttgaaaagaacattttagctgaaatttgggtagcagaaggctttgtggaatctgatggtggctttccaattctagacattggccatcggtactttgaagaccttgtaagtcggtccttctttcaaaaagttcgtggtacatatgtaatccatgacctgatgcatgacatggcacaactagtttcaaagcatgaatgcttcaccataaaagaattgagtgactttcagaaagttcctcggaatgtttgccatttgatgatactggattctagaaactttgattgttccaacttactgagcctatgtgagcacacgaagttgcgtactctactctgcgaaaagtctctaataagcaatataactttagcttcagtaatggaccgttggtgtagtgaacttcgacatatacgtgtgttttcttgtgtttccctaaaggagattccaatgagcattggcaatttgaaacatcttcggtaccttcgaatctccaaaaaatgtccttttcactgacttccaccagagatatgttggctatataaattgcagtttctttatgctacaaaatgcgcgctagaaagcttgccaagtgacttcagtaagttaatcaacctacagacatatgaatcagtgggatttgcatactatcgaatgaagaacctactgcctgttgcaggtaacgatcgaaatgttagattgatgaagaatttgaaccaattctgtggggatttggacatatatcctaggggatttagtaaggatcttgcaattgaaattgatcttaaaaacaagaaagatctcagaagactgaccctgaattggttgttcagttcatgtaaggacaatgaaatagtgcttcaagtcctgcaacctcccaccaatctgaaatgtctagaagtcgctggttatggaggtgaatctcttccatgctggagcaataacggcagcatttctgttttcccatccctgaccgacctagcaatttcttcctgtgaaaagttatcaagcctcgaccacttcctacaggcagattacatgccggtccttgagagaataagtataagagagtgtgcaaacgtaacatcactgcaaactgaaaggtttggtgaatttagttgccttggagattttactgtgtctaattgcccgaaacttttccataattcaggaagcttatcagtgccaaccctcaagaatctggagttgcgtaattccggtattcttctcagcaatattgagtgctcctccctcacctccttgtcctttaaatgtgtgcacgtgacagccattcccatacaactcttgagtggtaaccttccatctctacaaaagttaaacataatcgagtgtgaatctctcacatttattggagaatcgtatcccctcaatggagcattctcattccttactgtcctaatcattgaatgctgccacagattgccaaccctcgatggcctcctgaagaaagaacatctgcccgccattgagattattaaaatttattcttgtactgggttactgtccctgcccggtgaaaggtttgggagttttacttgtctcagtgatttgagaatttctcattgtccaaatatcaattggcaaagtggattggttttgccatcatatctcaaaaggctatcccatgaataattgtgggaatttttctgcctggtttcccaactgcctgggcagcctcacctgcctcgttgaactgacaatgattaagtgtcacggtatagaatcctttccaaaccaaatgtggagaagcaatctcgcctcactcaaggaattgcacattgctgattgcccagatctagtttcaatcggtgcggtgaagccaatctcaaaaataaagacggtgtacatatatgagtgtcagaagttgacgacagtaaagcagcctttcaccagaagaggaaggtaaaacgtagcctttgttcaaaggccgcattggatggaaaccctattgacccatggtattaattggtacgtgtgttcctacaccaaaattttctcgttgcggttctttctgagattttcctttttatcttcctgtcgtagctagcagaaaaaatttatgcatccaccaaattccgaaattatgatgagcatgctaaacagcttgatgtcacggatatgtacatattgttaacagtatgaggtttgctctggtcctgcaggtaccttggtacctgccggtacctgtaatccaaaccatcaatttccttccatccaacgggtgagaagaaaccgtaccggcggtactgcgcacgtgattgtatagaagatgaagaggtactaaggacataagggtagtcaggtaatttcgcgttccaattgtatcttcttcatctgcctcttatcctttctctctcttgaagatgccgacgagcagtagtggctcatcggagggttctcgccggtggagtggccattttgttttttttttcctcttttccgttctccggcgtaatctctggcgccgcttctggctgctgtagacgagcaaggtcgacataactgtgccaccgcaattggggtggccgcgccgtgcggatgcaaacgccgtcgcacgccacacagccgtagccgtaggaaaaaaaattgatatctctggctaacacatcgtccacgcccaccgctcctgtgagagctccaggctcctcgccagggacgccgccgccactaccgtctcgctgctaccatctcgtcatcggtcgcgctcggcagctccctgtgctttggctttggtggcagcgccggcgtgtcgttgctaaacaactggccgtcctcatcgtccttcccgccactgtgctagcttcaagcccttcaccggcgcgagctttgacacatccaagtacggcttgctatggcagcaagcagatgacgctgccagcggccatggtgcagccgcgtgaggacgaggagctagcgttggctgtttttcctcgtagtccagtccatcgcaccccctaacgattgaacggccagattttgttcagtacctcccggtacaaattgctggaccagagcaaacctctaacagtatagttagctcaaatcctagccaatctaggtaaacatgatccaatttagatattttcagctacattgagtagggaaaatatgcggtaaaaaccaccaaataagtaaaaatctgtgaaaaccatacctagaaggtttctaaattcgtgacaaaaagacttgttttttcctgccctaccatatataggagtaacccatatatgcaaaggtatatatatgttgaatatacctggatgtgtggcagtacgattgaatttagtgttcccattgcagcttgttaattttccagctgagtgcctgtgctgaccaatactctcttctttattaatgaaggattttttttgaggggatttattaatgaaggattgaatagctgccgaattgctctgagaccaatatgatggacttcaatggcatatactccctccgtttcataatataagactttctagcattgctcatattcatatagatgttaatgaatttatacacatatatatgtctacattcattaacatatatatgaatgtagacaatgctagaaagtcttacattatgaaacggatgaagatattctcccgagctctagtttcctccctctattgtcacttggggttggtttggtttgtggcctaaataggccttaccaaattttgtcattgccaaattttggtatgactaattttgacaaggtaaagttgtgtttggattgaagccaaaatagcctaagttcactattgaaatggcctattttcttaggcatgccaaaatttggcttcaaaccaaatagacactaaacattattacattattgaaattaccaaatattggtaaccctaatttaggcctcaaaccaaaccagcccttggcttattctctcaaacaatttgttgcaaaacagataaccctctgaaggttacccatttgtcctctccaaagcgacatgtacccgttggcatttccctttcaagtttcaaataagtgggggagaaaacattaagaatttctgttaaactgtatggttttatttgattgtgctaagagctttagagatttgtatgttaatcttaaattgaagtatgttttcattattattttgtgatgaacagttggtttttaagataattggttttgatatttggtgattcttagagaagtggtgtttctctttgtatggagccggttagagcgggtcgaataggccaattagaccgatgtggtatgtgcgatcagatcggctgactctgtgtcggtgtcagtttcaagtggtttatttggatactcgtgattttagtggctagatgatttctatatgtgtgcaatgctaatgttgagtgaggaaataacctgtgcttggatatgattcttgtttgattcatgtatagatgtcttgatacttcgggagagcgttgccggtgatggatcaggagtcaacttgggagaagatgacattcggacaatcaggatatcatgcgggacacttagcctaaagaataatgcacgtggttgatggaaattccatgcggcatacgatgggagattgtgtgcgtacggaaagtggagtcaaatttggaaggattccaaatttagtaaggttcgagttttaattgtaaaagataagttggatagttgtacgggaaggttgcctactagattaggacgactagttgtatttgtggcttttaggttacctacttcggatataaatagaagagggggttgaagcccctcggtattgattttttagtagttgagttgagagaaaaagttagggtttcgagtttagttgaattttgagataggagtgctatagtgacactttgcaaacacaattgttctttgagttgtgtttttccgggattggtggtcaaactgacaagagtgtggcggttagaccaatggaactacgacggtcagaccggtggcttccaggtggtgtgactggcggcatcaggtgacggcggtagagacaagacggttgggcgcactacaacaaaatcattgttttaagacgtttcacttatgtcgctacgtaagtcgtctatcttttacaagtaaaattgaaatagggacgatgtttgagacgctttattagttgaggaaatagttttaagacgctttacatgttagcacaaaattaaatcgtttagagatgaatattgagacgtttctgtagagatgagtttgtagacgtttttattatatgtgtgtcatcgttattagacaatatataattatttatatagagaaagacgaaaacaaacacaccgttcctaatcgtcatcatcaaataccattataataatattataattatttggacaaaaaaattgaatatttaatattcagtctcagattaaaaaaagaagagtatctgctacaggacgcatgtttgtagagttgcaatataaaaaaactatgtatttaccttcaatattgttcacgttaatgacttggttagcgcctgaactttgcaacctgcaggtgctgtgttcgaacgtagatgaaagcattaaatatttaatatcaaacatattaagacgtgcgtgtctatattgatgcttctataaaagcgttcctctatattttgtagagatgcaacatcttaaataatgtaggtattcctacgccgtctctcgcaacatcttaaataatgtaggtattcctacgcctagatgaaagcattaaatattcaatatcaaatatattaagacgtacgtgcctatattgatgcttctataaaagcgttcctatatattttgtagagatgcaatttacacgtctctagcaacatcttaaataatgtaggtattcctacgatgctttataaaagcgcctcaattatttgtgtacgacgctttataaaagcgcctcagttatttgtgggagatgaaatgaaacgtctctatccatcttaaataatgtaggtattcctacgacgctttataaaagcgcctcagttatttgtggaagatgaaataaaacgtctctatcctacaaataagatgtctccgttgggttgttttgtcgggagcttccatacccatcagatcgaaggcatctgtgcggtcagacctgtgcatctactccgtttagaccgatctccacagacgtttcaaggtaacttttaattccactaaaagttttccatttttggtgttccggcgattcattcccctctgatggacttattcttggtattcaatcctacaattactacttctgttttttaatgacaccgttgactttttgtataacattttaccattcgacttattcaaaaatttagtatagatatgtacaactataacaaaagattatagtttttatgataaacaagttacaacaagataaatgatatttatataattttttaaataagatgaatggttaaacatgtcgtgccctaaaaatcacccgaaaattttatcgtctaaattatttctagaaattgtaaaagccaaaaatagccttcaacaattaaaatcatcaggtttcaactcaaattggcatgtggaattcactatgatgggtacccaaaagtattggagggctacagtgattcaaaccggatatctgatgcttataagataaaagccacaagtggatatgtgttcacacttggaggtggtgttgtttcctggaagtcttgtaagcataccatcttaacgagatcaacaatggaatcataactcacatcattagacactgccagtgttgaggccaagtggcttcgtgatttcctgatggatttgccggtggttgaaaaactagtaccagctatcctactgaacagtaataatcaaacgatgattattaaggtgaacagttcgaaggataatatgaagtcatttagacatgtaaagagaagactgaagtctatcaaaaagctaaaaaactccgaagtgataacattggaatatgtccaaactgctaaaaatatgacatatcaggttactaagggaatatcatgtaatgtgatagacagtgcatcaagtgagatgggcttgagacccacttgaagttacacaatagtggtaacatatcctatgtgatcagagatcccatgaatttggatggcaaaacaagctattgggtgactaggaggagagacctttgaatgtgctcatttctttgatgtacttatctccctatctgtatgacaggttggctcataccttaatattattgttgatgcaaaaaacacacactggcatgggagatctgcttagctctagtgtaggtccaaatcttgatgaggtgcaggcatgccagtcagattgatcctgcaactaacaaggtatgcaaatagtagatcaatgagccgatcggctgacgagccgatggagtagttccagccgatgccgataccagtcgatagcgctagggttttgagctatcggctatatgtccaatgtatattttgatacttgagaaaataatgatataaaggcaatcgactgatgataatgcaagaaagcaacaatataatccagtagaaaccaactggctaacaatgacatgatagaataagcaatgatccgacggttaaagcatacatcggctggaggtccgatgtcataaaatccacaatattagattaaacagtgaaacctttgttgcgatcggctaaacccaacttgtatgtaatccttataagctgatgcaacgtccagataacttatcggctagcaccccgataaaacactagcatgaacctatcggctcaacaagatttatattatcaacaacaatctagtaggtcgaacctaactgatacagcacgagattgtatatgataatctaatactcgatgagccgatagatctgtctaatgtgatggatataacaaatctatttagaaaaaacattgtgattgtagagatatatcagttaagacagaagatcggacctaaccgagataggcccaactaaacagatgcgtctctaaacacaatgcaattagagatataattgagatattagataggcaaatatatcaaccaaaccagagcgatccaagagatcgaagcgatgcagccttgaacaacaccaacgtagccgatagattcactagggccggcggaacgtaggacttaccccttcaccggagattgaactgaaccgatgcagccccgcgtcaggtgccaaattccgctggatgataagtaaaaacctcggtaaagagggtggcgatgcgccaagagtagttgtattgatctagagatagattacaatgaccccgtgtgtacatatttatacccctgggtagatactagtccttgtaggacaagaaagaaactttcctaaagataaaaggaaaacataaagtacttataggacactaaacacactttcctaaagataaaaggaaactaacaaactattcctaattaatagataacttgtcatgccgcatcctacttgaactcggtcacttctggataaacttcctttgatagattaatttccttaaccgaatatagcaggaatttgactattggcgatgcgataattctcctaggggcttaccaaattttggtgttaacaatgatccaagtggcttttcttaaaataaagatgttggcgtgaacatcttagaaggaacacacatgtatgagtccaactgctagtcacatactatcatatttgggtgatctctatatgctcatgaaaaggcccggggtatgatttattcactcaaaacagaggagatgctaacaacagcctaatatcagttaaggaattgagtaaaacctaactgcacaagactgacaaatcaaggcatagtccattgttcacttatggttaggtgtagctccttttcaaggtgaaagataaacttaagagtctccaccgaaacactggtataacaaacaggtgcagaactgataacattttccgtgagccctcaaattcggtgaggattgttcggtttaatgggctaggcccaatttaatcctaataattccatgggcccacaattaatgttaggggattaataccaccatgaaaatcaacgtggaaagacctcgatttaaataggttgctatcaaagaacacctgttgagttgttgaggtggtggtgggattgccacgcgcgcgcgtagtggccgtgccatgatgtgtgtgtaggatggattcctctcccaacgttacgatttgttttgatgatcaaaagcgtaaccgacgtgcgatgatacttcagtaacgagtagagcagtgaattggcattgaatcagatttattccctgctaacatctctctcgcacagtatggagcagcgaatcgacattgaatcggatttattccctgctaacgtctctctctctctctctctatctctctctctcgcacagtataaatcccacttccggcatagacagaggtgaatccaattctctctgttcatgcccctcactctgattctccccaggaaagctctatgttcttttgttcctgagctacacatttatttccccaattctaagcatccatgcgcagtatggagcagcgaatcgacattgaatcggatttattccctgctaacgtctctctctttctcgcacagtataaatcccacttccagcatagacagaggtgaatccaattctctctgttcatccccctcactctaattctccccaggaaagctctatgttcttttgttcctgagctacgcatttatttccccaattctaagcatctgtgtgcatggatactcgagacaagtaggcttccggaactccgtttgcttgagtacctgcatgggtaggcgggcgatcaatcttcggggaagcgcgttcttcgcgcgacttctcttggcactgcatcctcttcgtcaaggtcttcttcctctacatcgcgatgtctaccaccggcgccagtgttactggaggagaagggaatggcggtactagaggaggttaaaccgagaacgtcagcatcaacggaggcaatgtcgatgcttcatcatcctctggagcgttcactgggtatattactactcttatcttggtgtttaacatgttgttagatgcttttattcctgttagcatatttatgtttatcaccatgctaggatcaccttttattacgtatgtcatgtttattatactatatttatatttttagattaaaatatgctgaattacaatcagatttccaacgtcctcaagtccagagaattactacactaccctagtggatgtcattttctctctagtttactatttagaggagggaacatatcatgtgcacacaagttttccgtgcacactccgtgcacactaactagcaaatatcacagaaaattctagaaaaaattggacacatacttccaatagtattacacctatgtgtgaaatcttatcttcaaattcattatattttagccgtaaaaaaaagaaaaaattctgacagattttaaccctttaaaccgtcagattttcttttttttttttgctactgctaaaatataatgaatttgaacattagactttacagatatgtgtagtacaattaggagtaaatgtctaatttttttctagaattttttataatatttgctagttggtttatacggagtgtgcacgaaaagattgtgtacattggatatgttcaacggtggatactaattggttagaaattggatgggtacctttcgaccactgtcatttaatcgatcgatgaactctattttggcatgagttgggcgttggaactttatgcaagccaggtcaagtcgtctcgttccttggagtgaagcttcctcgcacgcgcacggcgccttttcctccctcatttcttgatactactatctccgtttaaaattccgtttaaaattaagtgtacttgtggattttcgtattcaacgtttaatcatccgtttcatttaaaaaatattacaaattaaaaaaaaattagtcacacataaaaataacaacaaaaatactaatcataaaattttttcaaataaaacggatggttaaacgttaaatatgaacaatgtaaaactgtcctctttctagaatggaggtactacttactactccctccgacacattctagtactacaaatttgtatatattcacagtattataatgtaacatatatattcttaaatctaattttattggtacgaagggagtattagcttgagagttcagaggcagaggccagtgttggctacgagcctacgaagcggcggaaaatctgttccaattaggcaaaagcagagagcagattcactacgcgtagggcgccgggcagacgatcaagttaatcatcatctcccgccacggtaaccctcccctcctcctcccgtttgcttgtttacgtcttaactgattgctagtagtagtacgtctcatgactcgtaatctccctaaactgatctgaaatgttcgacgggaaacagcaggggcctgcctgcagctgcatgttttgatttgttttggtggccgctgcagccgccgggcccaacttcgcttcattgctctcccctcgattgtatgcatgccctctctccaatcttcttatttcttcatcacttgctgctctgttacttcgtgcggccgtaccaatgaaactgtttgcttctaatgtacaaactacacctgaggattcttttcttttggttaactgcacgcttgcctgatctccttcactaaaagaactgtgcacttgctcttttgcccctgcgttgcaacgggaaaaactaaagttgcatacacatacaaatgatcaaggatttattttcatatgatcttaactcttctataaaaaaatattcttcacgtagagctgctagataacttgttttttgaaaatacttttgttctcacctccaacatgagctaattttttaaagaaaactcgcacatatcctattagaatgggttaatggcattacttcttgttagtaccattgcatttgcatgtgacatttctaatcggctccggtgattccaattaccatgcaaacaaaatcttatcacagtcctgtcatacgagtgctgaagctgaattacgagctcttgcaactgcaactgctgaagttatatggctccaatggctacttgctgatcttggcattctcctttcacaacctacttaactattttgtgacaacacaagtgctatccaaatagcatcaaattttgtgaaacatgaactcagtatacatataggggctgatgcttccttttcatggtttcattgccaacataacttcaagttgcagacttcttcaccaaaccacaaactcagaatccgcacaattttcttctttccaaacataacgttgttgatccgcctatagtttgatagggggtgttaatgtatatacatatatcttcctgttttggccttttggcccacttggcccatgtacatgtatatgacttgagtcgtgagggatggggagaggatcaactatggccaaagggtaaaatggtcttatcatgttgctttgtcttttttactttagttttgtgaattattttgtcgtcttaattgcactgtttcagacggtaatggcaaacaaaaggtacatagaccaacttcagtggaaaatttgcaattgaagttttttttaatggctattctgagttaggggggtgaaagtagtggtatatttgtaattctcccaaccggaaattctatagagcactatgaaaagataaaaacttcagctttatcatatatgacttaatcacaagatatacttttatgtttttcactaaattaatctactctgttcacagggcttgaaggaatccccagactccaatcaccatgagcttatccaagaccattgggttcattagtggcatcaatgagtgttttaatttttttcagtgggcaaaatctgccatgtcatgtgtccactctcgatggagcaacacacaggatcaaaagcttcagggtgaattgttgcaattgcagagtagcttgcaatgtctgagggatactcttcctgcaaagtacgatctaatcgatcgcgcagagtggaggagccacgaacgccgtgtggccgagctcctcccaaatctcaaggatgcaatgtacaacgctgatgaccttcttgatgagttcagatggtatgaacaaaaggtggcactggaaggtaatgcaagccaatctccttttatggacttctttgatagtgtcattcaaggaagctttaataaagtgaacgatgtcatcaaaaggctgtataatatttctagccaactggagaagatggggctgcatgaagttccccggcggtttgacaattcactcaggccagagaccagctctttcctaaatgaaagagaaatatttggtcgtgataatgaactgcagcaagtgatggaattgcttggtgtacctaaaaacggcaccgatgctcgttccaagcgcaggagaaaaaataatgatgaatcaacaagcacatcaagatgcaaccaagaaagtattcctgttctgccaatagttggaattgggggtgttggaaagaccactatggcccaacatatattgcatgatccacgagtgatttctcactttgatatgataatttggatttgtgtttcagacgactttgatgtgaagagattaactaaagaagccatacaatcctcttctaaaaaagagtcaacaacttttgatgggaagagaataactaaagaagccatacaatcctattctaagaaagagtcaacagctgatcatttggattcacttcagcacgctctttctgaaaaagtgcgggataaaacattattgattatacttgatgacatgtgggatgatgccctgagggaaagcggacgatgttggaagaggttttgtgcacctttttcaaatgttttggcacagggaagtataatgttagtcaccactagatctttagaggttgctcatgaggtgaaaacaatggaacccgtccgattagagggattgaaggatgatatcttctggaatttcttcaaaatatgcacatttggatcttccgattctagtgattatccggagctagagcgcatcggtagaaacatagtcccaaagttgaagggttcaccattagccgccaaaacattaggacgcctgttgagaaccagccttgacattgcacattggaataacatactacagagtgaactatgggagctgagacaacataacactgagattttgcccgctcttcggttgagttacttgtatctaccattccacttgaagagatgcttctcgttctgtgctctttacccaaaagatcacctatttgaaaaggccggtttagctgaaatttggattgcagaaggcttcgtggaacctgaaggtagcattccaattctagatattggttgtcagtactttgaagaacttgtaaatcggtcattctttcagaaagttcatggcaattatgtaatccatgatttgctgcatgacatggcacaattagtttcaaagcatgagtgcttcatcttaaaagacaaggatgattttgagaaagttccttcaagtgttcgtcatctattcatactccctagcacaaattttgactgcaatctcttgctgagcctttgtaagcacaaaaagttgcgcactctactctgccacaggtctctacaggataagactttagcatgtgttatggaccgttggtgcactgaacttcagcatatgcgtgtgattgtttgtccctacacaaaggagttaccggcgagtattgggaaattgaagcatctacggtaccttaaaatctctggagactgtcctttcaaaagccttcctcaagagttttgtcatctatataatttgcagattttttcggctacaaaatgcaggctagaaaacttgcccagtgacttcaataagttaaggaatttacggagatttgattcatgtgcatttcgttgtgatcccaagttccaaactcattttgatgcaattaatggacaggaagttggagctatactgcagtatgtgaaccatatttgcggaggtctgacgatagataatattggtctaataagaaaggatattgctgcaaaagccgcactaaagaacaagaaatatgtcaacacgatgaccctgaaatggtcttctatgggacaacaagtgcagaagttgactgaggtgcttcaagttctaattcctcccactagtctcagttatctgaacctcacgggttgtccaggtgaatttcttccaacctggtttcatccaagtaatttgccaatgttaacatcccttgagcttattgcttgccatgattttgtgaccataccaactcccagcatgtcacagtccatagacccaaatgagatacccaaggttctaactgagaacaataaaggcagacctggaatattttcatccctgaaccacgtaatcattgaaagttgcaataagttatcaaacctcgaccaatttctacaacctgcttacttaccggccatcaagacaataaagattacaaaatgtagacagttagttgaactgccaactgacaggttgggtgaattccatttccttgaagaactggaggtgtctcattgcccgaatttgaatgatccacaaagcttgtcaatacctaccctcaagaagctcaagctgattaattcttggaatctcctgggagacattgagtgttgttccctgacctccttggttttttccctttggcatgtaacctccattcccttgcatgtctggagcagtagctttccagcactacagaagttacagattgcagacagtgggattactggagagtctcaatcatcagtcctcaccagcctttctgttccaggagaatacagcagcattagaacattctcatgcctcactgacctgaaaataagcagctgcaataatatgacgaccctcgatcacctcttgtggcctgagcatcaacctgctgtagagaaaatttatgttgccctatgtagcagtctgcgtaccctgccgtgtgaactgttgaaggacttttctgttctgaaggatctgaagatttgtttctgtccaagtctcaagtggcacaggcgcctggttttgccatctactctccaaaggctctccttaactagatgtggggatatctctccctgtgtacccagctgcctggagaaccttgcctccctcgtgtcactggagatcaccttttgctcaattgtggcatacattccagcttcactgtggcgcggtaatctctcatcgctccgggatttacatattcggggttgcgaagatcttgtatcaattggtggagcaggcgcgattgcggaaataaacaaggtgaagatagaaggctgtctaaagctgaaggaaatagagcagccaatgagcagagccagactgtagatctcatgagagagccgattcaatctttgtgtgatgatgccaaaaatttcccttctagctcttaccaagattttccctttctacaagcattgtgtcctgaactctttttctaatgctacttatgtgcgtactgtttccaaattagttgcttctaaaccttagctagttactgtatgctactcccaccgtcccaaaatataagcatttttagcataatgacaagtcaagcatttttaactttgactattaatagaaaaaaaaataaagaagatcaatcatgtaaaattgatgttactaaatttatcattaaacaaactatctaatatgcaattctttttatataaaacattttgtttttatagatattttttgtcaaagtagcatctcgaaaaccgtgtcagaatccaaaaatgtttatattttgggacggaggaagtatattcttaacctaagtatactttaaaatatattagtttaaacagcaaaataacttatatccttcacctgtagtactaacatatgatttaaactttaaacggcaagggaatttacttatccaggaatccaattactgtggaaatacattgaggagtttaaaacattcttgtttttgttgagggcactgtaccgaccaaagttctctcctttattaatggaggatggagcgactggtaaaatggagctaataggtggactattggagaactacggggcacttcttttgatagcaaaaatctactcatccataattttcttcactctgttgtcctgtttttacttaactacataagatgatttcttttcatcaagcaatttactggaaagcataatgcctctgaaaggtttgattagcctcaagaacttcagcttgattactgaaaattgaaaactccaattatctatcatatagtaatgaaaactctaagcagtctatttcttcaaatagatacaccctgcccattctctctacccttcaaacaggtatagtagtgaaatccactacaaaacagtgagggtgcttattctgaataaattcgttcacaacagactgcactgagagaagggctataagcgtacagcgatatatgactatggaacacccattccaggaaggtttttttttaacatctactgaagcgcgttcagcaaaaataaagaggaagggtgtcctgaacaacatagccaaaatgaacacctcaagatatgctggaagctattccatctatgcctggatcactaggcctggggcttctcctcggctttctttggctgccaggcaaaaagatgtcaaacttgtcaatgagaaacacaacacgtcgaatactgccaatgagaaataatagtagaacctggctatggaatagaaaattctcttagataagtctggcatctaaaaagaaataaaacgcaaaacataacactctgtttttttagtaaaaatatttgagttggtagtggtgatggccatcagacacatcaggacatcattgcaacagtatgcacttctgtttcaatgcacaaacagctggctacttgcaacataaactgaacgaatagacatgcaaactgttccctgaaaggggcagtttgggagtacaataacaagcaaatgaatatacctagcaatcgatcatgttagtattgagattttgcatatgaacactggcaaataaaggatgcttagttcactaaattttagtacaaaatgaattgacacaacctacaaatgaacccatattaaacagtactccctccgtttcataatataagactttctagtattgcccatattcatatagatgttaatgaacctagatatatacatatgtctagattcattaacatctatatgaatgtggacaatcctaaaaagtcttacattgtgaaacggagggagtataaagcactcaagtttatatgaatttgaggaagaaagcattcctgtggatagtttaatcaaataactattgaacttctttctaaaggtacacatacacacagaaggacatctttgcttgtcaattgcactgcttgcatttagtaatggtacgtattaaattaaataactttcataaatgatactaacctttcacacaagatgccatgcatgactagagtaaaatttagctctagattgattaaatgaaaatttttgcttctgcaagttaaaaattccctataaattgaacaagttctgaatgaaggactttggaaatattttggtgttaattaataagtggggagattgtagttgccactaatgactcagttctctgttgtgccacgaaaaaaccactaactgcctttacaccatttctgtaaattgttgttttcgattagtcctctcaggtactaaactgttgagactattgcagcctacccagtgcaaacaaaatagttcataaaccatccctcatcaaatgaagaataggacatttctttagtagccaaaaaaacacataaaaagttaaatctagacctgctaaatacatcttagctgtatactgttgcattgcttgcctgttaacagcagacttgtatatcacttaaattggcaccttcacttacaaacaagggtgcaagtttgcgaacttatgggtacccactgacccacaccattatctaaaagtacattttgtccccattccctagttcagattagttagaaaactgtaagccaaatgaaccagcatggatcgatgggtacacgcaggcttactaggcatttttccaaagaagcatcaatatctgttatctaagacggaattccataccttaaccaaactctcatgtacaagccttagatgaaaaacataagtttatgaatgtctccaaagtagcggctcaaactattctaatatgatgccttaaaggcttttttgaattgattctaaataaatgcttgctacattgttcacccctgctgcccgcacacaacttgtttgttgaattgccggagtggaagtcttatgcttttctaccttgcatagtgggcctttattattggattaagatgttatctataactttcttctgtatgattagaagtataccgctatatgagcctcatggagttgtgacgagtttattgaactgggactaaaagctaacgaatacggtaagtagtatcgcccacaaggtgttcgatcaaatgaaactatataatcacccaaaaggccacccatagtagcacaagaaacgcacgcgcaggcaaggtgttggacgaaaggaagacgaagaggcgaaccttgatgcccgggaacgacatggtgagctcctcctcggggatgaggacgggccacttctccccgccgtcgcggaagagctgctcagtgtcgaggaggcgcccgcggtcgaggatctggtcgcggatcccctgcgcggtggcgccctccgcggcgacgaaggactcctcgacgccgttgaagtaggtgacgagcacgcgcgggggcgggtgggcgttcttctccccggccgccgcggcgtcggcggggggcggcgaggggaggcggcggagctcgacggagcaggccgggttggagtccttggccttgcggccgttgcactgcgccaggagctccaccaccgccgccttccgcgggtccagcgggcagtactccaccaccaccttcgacaagaacttgagcatctctccgacccacgattcgggacgccggaggatgacggcgacgatgcggtgcggtgttgccggggaagaagaaatgccgggacgatgcccgagctgacgaacgcggcgatgccggcggccgaccacgcggcgtcgacggcgggccgcggactcccttcgacccagcttcagcggtggcgcggggccggcaggcgtcgatgccgcgaggcgggtgggcgggggccgactcgaggcgatgggccggcgggcgtcgacggcgcggcgtcacccgtcgatggcggcgctcggtcgaggggatagagcctgatttagggttctggatgcaggggtatattgatcatttcgtgcccattccacgctggcatacacatgtggcgatgtacagtgcgacaggtggaaaaaaaaaagaaagaaaacatctccacaatggcatattgttaatgcaaacctaataagggtatttgagcaattatcgaacgtaaaagtgatgaaaaattaaatttctcaaaataaatcggacactaacatgacctaataatgcacccacgttggatccgcctctactagtaccaatagctggacttgagtcccccctacacccacaagacccatggatatccccggagcacccccttcgattttttttatcatgaatgataaattaaatgtctctaaatggctgaagattgaagaaaccgtgtaacagagtcccctcaattttttgttcctggatccgcccttggttactaaccgtgcaatttatactagtaacccacatgtcatggtctcgtggagtcttctttctccaaaggacctcaaatcagcccaactgaattcacacatgctacaggagtggcagagagtgtcaagccactgtcgtcttgtcctttcctctaccatgcttcccgcttgcttcaagaggataccactagctgggggatgcaggagcggtaaggaatattcagtcaccattgagtcggtcctatgcttcgagttccttcttgcttgctcgataaggaagacgacgtcacgtagattaggaggacacatctgtcaactgtaggtttaagagagacgacaagctcagacgaccaaggttacatgggaggtgcattacagtagaagatctctcctataatgcatgttttggtttactaaaactgaaggcactcagaaggaaattgaatggatagaaaaaaattgggaaggggcatataggagggaaaagtcaataattctagaaaaaataatgcaatagaccccaaggctgaaaatgtagatatgaattacacacagggaggagagaagagagttggagaataaactgaagtttgttataagagaagtaaaactcaaatggttccaaagaggtaaggaaaaataaattttagaaggagatggaaacactaaatattatcatgctaaggcaaatgaaagaaaaagaaacggacaaattcactcacttatacaggataaaggagagattaagggacaagctaatcttctaagttatataacaaaattctataaggagctctttggccactcaaaagaaaacacagtaactctagagttggaaggtgtaaaaacagtttctaaagaagacaaaataatgttgatcaaacctttcactctggatgaaatcaaaacagtggtctttggtctgaaaaaaaacacctggcccaaatggtttacctggagggttttatatgaacttatgggaactaactaagaccctctttgttttagcttagggttttcataatctggattattaggaataatttgagataaacatgtagattattataatctataagccggattgatataatctggtaatctcctctaaacatgcttttgcagattattgggtggctaaatacctactacccttaaaaattttatacaaattacccaccactgccatcgaacccaacagatcaagcgcattcgctttctttctcctcagttgcgcacgaacctggtgtcttccccaagccgtgtgtgcatccgcttcctcactccctagtcgcacatgaatccttccccaagtccccaccctacatgtgaatccttccccaagccccaccctgcacctcggttccttccccaagtcgcatcgccactgttgttgttgttgccatctcatcctttttccccgactccgtaacagctgagggtattgagggtattatagacattaacctttcaaacccaataatccatgtctccaataatctagagaaacaaacaactcatagcttattataatctagcttatagtaatctggcttaataatctggattacgacaatcttaagttgaaacaaacaaggcctaataaaatataatctgctaaggctgataaatgatttccataggggagtgaataaaattaatagactaaattatggtgttgcaaactagtgctcacgacgtagtcgcggaggtcgagcactcgagcaactcaaaaaggctactactactaccgacgaccgagtcacaaagctagaggcccaactatcagaggcctgggcggacacaaagaagcttcgggagatggttgtcggccacgagcggtagtggcaaggttgggaggaatgtgtggaataagtctaggagaacctagcatctcttcgacaaggcctccacttcaagtagggaggcacaagaaggtacccaagttccctgacaagactacggtcttggggtccctgggcaccctgatcggcaaactggaggctacagtatccaagcacgccgctcaggccgccaaggagatgcacaccgatcgatggacgagcacttgcgatgtccttgtgtgtatcaagctcacacaccccgagatcaacctggaagaggtgctatccaagagcggggcggagaagacacacgagggcataaaatactttcccgagtcagagctatctgtaggcggcgagtcagaacgagatcgagggtggcgcagcaagcgagctcgatggacaatgatggtgttgcgttgaaggaaccccatggcctcgatgcagagattatatttcccatcataccctttgcccctttggtaatggacggttggatatgtgtggtaccttatggtacctggtaaaaatcctcaccctcaaattatagtatttgatattgactctgacaacattctcacgagtgttaatataattaaaaataattttttttctaaaaatatggtgccacattatcctcttttaattagataataaattattttgaatcataattttttatattgtgtattagaaaaaattgcaatgtaaatattgaaacttgtaatgttataagctttgaaatttacagtgtaattctcacataagtgtagctaatttactgtataaggatgatttggctgtattttttcggaaaatacagtgccataaatatagttactcctatttaaaaaaaggcaacagtaaaacgtgcaatgttgttcacttgtttgataatcttgatagtctcttatgtaactcatatatcattctcctgcttgcatattgtaggaagttgttagctggtaatttgtaatcatacatgagataagaactatatgtaagctagcattttgttgtgaaaacataatttagcacaaaggcggaccaaattataagtataaattagctagtatggctgtatgattttctagctaaaagatcaactcaatgttctgagccttgcaatataattattgcacatgtaatgaacaaacattcacccggtgaacatacacatctctagattcctgtcaaataaaaaaaacatatctccagactccacatatatagcatgtgcattttttgaaatcccatatgtcatcagctccaattgtttttgttatttagttacctacaaacaaagtacttccagaaaagataaaccgttaataatattgattgataccatctgagaacaaaaagagaccataaataaggctgatagcatcaagaacacataataacccataaggtacatattgaacttgatgatttctcaagcagcactgctcgtgataacaattgagaagagtacgcatctagtacagacatcgcacctcttgatctatctctactctctagtgtacctattacacatatatagcattctaaaaaagtaaatattatctaaatgcccaaaatgtagataaaaaagaaaatatggactattcatatcaacaattttagccatttacatctggtattgatactaccgtttatattcagggcatgtctcaacatagtgccatttagcttgttatacacagagcctgaactgacctaatgaagacattgtaaagatgtgtatttgtggtctagtaaagttctagccaatatcaaaatcttcaactgaagtatagaatttcttgttgctagatatgcaacattccttgtgattgtcagtaagttccatagccattgattgacatggtagtattggttattgtgcaagaaagatcaggtaaagatgtagccttttaccataaagaaataactaccagataacagcaaattaacaaataaaatattatctgatgaaaagggagggaagttgaggagactcaagagatgtagcatctgcccgtagcatactatcgtggacatgtggtgagcattcagaagaccaagattattacctcttcaagtaaacaacaaagaacttccatacgatccaaatagaaacacaacaattggcaagtggctgttgaaagaagatatatcatcgatatggaacttacaataagtaggaaaccaagaacaaataagagatatcatgggcttcatatatatcagctacatatacatgtaatatgtgaaacatcttatcggaactcagagggaggatcgacggtttaagtagtggtgcatatcaaacggtgttagctgactgattcgcaggaggggcaagatagtggatgtgtaggaaatggcaacaacaggccagattgattagagccagcatgaaagaatgaacacaacaaataattaggactgggcaagggggaagaaatggctgttgaaatgaactctctgagttttggaacacaggtagctgagaaaaaaaaataacttcacatagtcaagcttttttcattctaccatggcactttatagtaaaaatctggagacatctgtatagacacttaagcctcctttaatttgcattcagcgaaacattatcaatggatcgtagttcctacactaaaaactacctcattcgataatatcctattatccccaactggctgtcaataactgaaagcctacttggctgttgtaataaaatatatgagttttggaacacagtagttgctccaatggtacataggcttcaatttgaattatcacattttagttatatgactatgtatgtagcatgttaagcatatttctgttatcaataactatttcaattgtagaaaaaaaactataacagaagtatatggtttttagtgcctgaattcgcacacctaaggagagataccctacttccccaaaatgcattagtgctcctaaagagagaacctagctatagtgcctctagctaagaggacaaaccaaattaagggacaaaaatagcatgccaaaggtccaatggccacagcataggtcaatggtagctaaaatttcagttctatatagtttaggatgacttcatgtgatgttttaagaaaagtaactgattcgtatggaagaaaaacagaacttagaaagatatgttccacttctgcacaagaagacaaaagaaaaagaaaaggaggaatgagatgtcttaccgctatatgtttccattgcagattagttttattcacactttcaagtgaacaaagtccactaaaagctaccatcagtatgtataaagaccatgggtgaggttgagaggcaatatattcaggatttgacttttcttttcggcagatgagcttagtagcaggacatgtttgcacagaaatcatattgtattgcataattgtttaaccttttgaaagaggaacaaatcaatatatttagataacgaaataatatatctgcaagagttcttagtgcagattgctaacctgagatatagttatctcatccaatgatagaaatatacaacctgcctaagtcgacgaattgaagaaagcgaggtcccagtgagaaatatcaaaacttaagcctaataagatcatttagatggtactaaaaatagctagaaaccatgaaacaaaataaaaaaaattcatttttaatagtcagtgtgtgtagggaacttaatgtgcacccatctgaagacctgcatcagcatggcacacaccatgtcctcatatcttgtttgtgccttagaagcattaaaagacttgttttgtgtggacagttaatcttgcaacaactaatctgttacctatcaacaaaagtaacagtcaaagatcaagctaatactcaaaattgtttgtcaatggaatataaatgaaactatattgttgataaggcatgatagagagatatgatgaacagtctttcagagtacatataaagcaaatatttgcatgtgttgtcttaaagaaggaataaatcaaggataaaatgatcaaggtgtcttaaagaatgaataaatcaaggataaaatgatcaaggtatgatgaccttgagcagtttctgcaaggcatgaagccatcaaaccaagcctattttttttaccagaacgcaaacagattgagcttatcactggacattgcagaaatgtcactcttctaaaacaaataacatcaaggaaaaacaaatggcccagaaacatcagatttcatcatcaaacatacaccacggcaaagctgacagtagcatatcactgcaaaaaaacaccaagaatcagcagcaatcgttaagtacgacaactgagaagaccatacatacatgaccccaacaggcttgtgcatggatttcttaccatactacaccatagcgaatgcaattaaaatcaaaggaaataattggatttcagtttatctcatcattggtggcaaatttagcaagaatattaccatttgaatattgcagagctgcggccatccttaacagtgaggacattaactgaatcttgcagccttgcaagcagccataacagcgaggataaaacttaatggatggcttagcctgacagcggatgcaaactgcagcaatggaagacaatcctctgcctaatctgctgtacatcctaacccatgagtaactcaatgggaccaaggcaagatggtggatcctataaaacctcaagtgaatgcatgggaaataatcaatgatgaggtagaacagacttacattgcagcctctgtgctaatggtcggctggtcagcgcaaggacatgaattagaacaggagggaggggagcggcacctcgactgatggcgtcgacctttcacagctgcagcagatcgatgatgcaaaaccaacatgtcaaatgccagtggacagagaatacgcgagtggcggtgccgcggatttggtggacctgacctctagacctcattgggagggagaggcagcggtgggtcggcgacgatggctggaggagggcgagactgcgatgacgacgacgtgcgcgagtgaaggaagatggtgagtctgcgatggaaacgatgccgtgcgagtggaggaggacggcgaggagaggcgaggcaacgcgcgtgagggcaggagaacggcgaggtggcggtggcgacggcgcatgcgaggggaggagccgaggaggagagcgtggcggcgcgcagagggaggagggcgagtgcgcgtgcgagggtggggggcgacggggctagggtttggtgcaggccagcgaaatccacaccgtccgttccggatccaacgatttcacaggtacggaagggccggcacagttggacacgtgtacggccagatctaccctagatcgagatccgacgggtttacggtggatatcagcggggaccaatgcgtaattaacagaactgcgggggcttttttgcaaaagtgacatctgccgtggcacccctaactttccagcattcccacggcgtttaagtaaatcatcaatatatcagcggggaccaatgcgtaattaacagaactacgggggctttttttgcaaaagtgacatctgacgtggcacccctaactttccagcattcccacggcgtttaattaaatcaatatatatgcattgccactgtattggaggtgggaggaagcgtgtacgtatgtctagcctaggccagtacgggagggatgcggcttcccctccacacccttgcacctccgtgtctcacgcacggcgtgttattacttctccgtttccttttgtcgtatgagcaacactagaattttttttaaaaaaaatccccagttatttgatgcttcccccccatcccatcagccatggtcctgaactaagctttggttgtgtttagataaggggtataaagttttggtatgtcacatcagatatatgaacacacatttgaagtattaaacatagtctaataacaaaattacagaatccacctgtaaaccacgagacgaatttattaagcctaattaattcatcattaacaatgtttaatgtagcaccatattgtcaaatcatggcgcaattaggcttaaaagattcgtctcgcaatttacacacaatttgtgtaattaattattttttttatctatatttaatactccatgcatacatccaaatatttgatgtgacatagtgtaatttcgaagggatctaaacaaggcctctatgatgatggtggcggcgacagcggtagcggattcagtccctctgctgccgagcacaagcgacacgagcagattggcaacctcgccgtcgagctcaagcacccgcgccttgcttcggagccatcagccatggtaccgaggtaacctagcttcatgggaccacccgcggcggctgatttggtcccttgcagccgagcacaagcgacacacgagcagatcggcgtcctcgccggcaagctcgagcaccacgcagtgcattaggcaacacaacatcgatctcaaagtgcgggccacccaatcgattgccttgcttccgagttggagcttgggctcttggaactagtagcaggtagtacttgtctctgatcctgatcttctttcgtggttttgctttaaatctgttcttttggtacggtatcataatgatattttgtagcttaacaatatggcaaaaatattttgtagcctgaagaagtgaagataatatttgcaatctcatatcccctagactatatagttcagtaacttacaagtgtaaattgtttatgtactaaggaaaaggctatacgtactaactttttcttactaaattcttactaacactgatgtgtcatgctatgagtacacctagaatttttgtaacttccatctacttaaatcaaacggttgagatgattgttagtaaaagtttagtatgaaaaatttagtacgtgtagcattgctcatgtactaaatatatttaataaatcaattaaacatgtagtgaaaatcgtgtcatattgctgaatcggcctcccttgatgcaacccttgactttgtggagtcattaacataggagtatgaaatgaataggagtatgaaatgaagtatgtgtccatgcatccagagcagtgctatactctgatacgtgtaaaaaaaagtgtggttattgggaacctctagatgatcctaacacaagaaaaagtaatggaaaaaaatcagtgacaataatcaaggcaagcagtttcttttaagaaaaacgattatgtgatcagtaataccattactgtggtatgtggatgtggttgcgcttgcatctctacaggttgaggatgcagtgattgggctgggacatcgttgtgcactactacaaaaatacccattagtgccggttcttaaggcctaataagtgtcggtttcgggcccgacaccttttggtcggcactagtgatcaaagttattggtgccggttccagaaccggcacctataatattataggtgccggttatacaccaagaaccgatacctatatttattataggtgccggttgtaccctagaaccgacacctatattgattataggtgtcggtttttttataagaatcggcacctataattctaaaagccataaaaaacatattgtgaaatacataatcctgaaacacagaaatcacaaaaattacacaatattatattcgcagattcacatatgcattcacacaaatatggacattcacatatgcattcgcagattcacatatgcattcacacaaatatggacgttcacatatgcattcgtatacgcatccacacaaatcacagaatattacattcacatatgacatccacatcctccacatccacatcatccacagaaatacaatatggaacaagaatgacacaataatattcgcatcgtccaccaaaatcacagaatattacattcacatcttgcacatccacatcattcacatttccaagaagtctcattttaaaatcccacaacagttcatatcattcacatcttcttccggtgacattttctaaagattgatgatcaaataacaaaaacgataaaacttcatttacagtaggtatgttattgctaaaatttgaaaagagaaggataaacacgtggcaaaagtgaaggataaacacatggcaatagcaaaagtaaatgcagagttagaaactgtagcattcagtacctagtgttgtactaattacataggctaaatgtagagtagaactaaaattttgttgttaattaacaggttaaggttaaggtgccctcaggcctcatggacacaccagaggaccaataacatggtgaccatgagctgtttgcttggctttcagcttcagaactcaaaagggaaaaatattaaagtgaacagggttattttgacaaaagtgttactgatttccagccatttttgaaccatcagtgcagatatgtcatattagtctctaattaatcctcccggttgaatttattaaactaaagagttgtgatatttatatactccatagttctgatttgcagggtcaatgccagcattggtgaagttgacactgaagaagaatgagaagatgaagaagatttgtaattttcagtgacttgtatctgtatttgtagaaaggaattttcagtgatttgtaattatctgtatctgtaatgagaagatgaagaagatttgtaattttgtactactaatttagtagtacaaaattagtgacaggtagaagagactaatgtgatccaaaattagtgacagttgcggtctaaaacactatcaaccaagataattatagtaaagaggagaggggaacctcttggcgtcgatccacggcggcgggcggtggcggtggcggcggtgggggcggtagggggaggtagggtggcgggcggtgtgggcggagagcagagggagcggcggcggtggaggagatccgagggagcggcggcggtgggtggtggcggtggcggtggcggtggcggtggcggcagtgggcggacggcggcggcaagtggcgacgacgacgatggacgacgatggcgacgaccgcgattgtgaggagcgggtgggcggataaggctgggggagtatatactagccacataggtgtcggtttgtgtggtagaaccgatacctacagggataaaaggtgccgactttttattagaaaaccggcactcttccataatataggtgttggttttttttaaaaaaaaccgacacataaaaccgacacctatatgtttgcatcatattggccggcaagggaaataggtgccggttttgatgtttgcatcatataggccggcgagggaaataggtcctatttccctcgccggcctatatgatgcaaacatataggtgttggttcgtttaaataaccaccacctttcgtataggtgctgtttttgtccacgaccgccacctatgcgattttcggaccgttggcgggagtatttttagtgccggttttagataaaaaccggtaccaatgaccttcccaacaaaaaccgacacctattaatcgttatagatgccggtttttcgctacattgacggaaaatgacttataggtgtcggtttttgactaaccagcacctttgtgaccgacacctatgggtgtttttgtagtagtggcggcagatgcatcttccaagaacatagaacttgctcctgcatcatgcagttgtgatgcctctcatggaggaatcatgctgttgtttggcatagcaccaagagttggcgtcgatgccggtgcttgatatgagagcttaatttaccaagatgctaatacatgtttagacgtgagttgtttggatgctagaggttttgacgggagaactgagacaaatggtgccataattctttttcccgccagcaattctatctatttggtgcctaaaaactgttattaaagttaatgacgttgtttccaattattaaacggaggcataacaccgtgcgtgtgacgaaggcgcaaggtgtgaaggcccactagaaaatactaaactaataaacgattgacatatgcagggaactgggatgggaacatggaattggaagaagccgcatccgtaagggagaggagagggtgggctggtcggaaagtggagagggtttcatgttccctcattgaggcttacagtttcatctagcacaagtagggatgaaaacggtacggaaacggatggaaaccacttttatcgttttcgttttcatattttttcggaatcggaatcggaattgaaataaccccgaatacgaaaacaaaatcgtatattatcgaatacaaaaacagagcgaatatgaatcggagcaaatacggttggatatttatcaaaatataaaaaccccttaaactaaaattctcagatcaagaaaaaatgtagctaaatattatttttctaaaacaataaatcaagatttctatattttatcgattaattaatggttaaaagcagtgcacaacggaaagtcgggtagtctaaaaaaaatgaaacataagtcaggtcgtttcttcgcggaagcttcctcgagcccacgctgcggcgcctctcccctttaccttgctttttcacatatccccttttaccttgctaacttggagcgcccccgtaggcaaccctagtcaggtcaggtcgtttcttcgcggaagctttctcgcgctttcttctcttcctcacatatattggctagcttggagcgcccacgtcgcggttgcctacgagcgacaaagaataataagagcatccactccaagcaagaagatactccagtccagatcgatagtattgacttggccgaacgatcgatcgtctccggccacggtaagatcgattctcctatatgcgatcaagtcctgatccctctcttgtgtgtagatcgatactcctactgaattactctgaagatacacttgactcaagtggagtggtaagagttgtgtggttttaactttgatccagttcgcgtgttcaattctcaacacgttcataattttttcttagaaaatatttggaaagacgtctctccctttaaatctgtttctttttaactgattaatctgaaatgttcgatgtgaaacaggacttgctggtccttggttaatctgatcttgacatgtgagaggcaggaccgattattttgttggccgccgggggcctcgcccaagttgatcaaagccaaatctggtcgcactttacactcgatctcccctctacagtatgtctccatatattcacatgtacgcaatcatataattcatccaattcacaactatacctatatatctccatctctaccacttaaaaaattaaaaacgtttccgtcatccgtaataacgaaaaaaggcgaaaaaacataaaaagaaaaaaaaaggaaagtctgattcaatgacgctgagtcccatatatttctatttctaaagccacaattgaaatttgccaacaaaattttccaaattcgaagaaccctaatttcggataagaaccccaagagtcaaaatccaaatcaattaagataagggttcggattacatttaccggatttgaagcccctaagctcaccggagcggcaccaccgcaccttcacctcctcgcagtcgcgtcgggttcctcgtgcgcacactatcctagagcacccctccaccgtcccttgccagagacggcaagagtaggcttggtgcctccccccacgcccgccaccgatgaggtccgggccgctcggcgctcattgccgtttgcgcgccgccctcgggtgtgccccccagccggcgaagcaggagccgctcgacggtcgtcaccgcacgcgcacgctggccggaccgccttcattccgctcgctcgtcaccggagagaaaggggatcgggagagaaggatatgggagctagggttttgcccctctctctcggttggcgcttcatctgacgcgaggatgatcggagccatccatcagataggacgtctcagatttgccccgcgtcgggccgccgctgctgattactctgcccaatgggccgcggaactgcatcgggccatcgccgcgaatgtgggccacgctcggcttctcggcttgtgggccgttgaactgactcggctcgcacgaagacgggttggcccaagtttgggctggctttggaagacctgggccaaaagttaagaaaatcatttataagccttcttaggcaaatagagttgatgaaaaattattttagcctctaaatgaaattatttctaaaccagacatcggcttcaattaatggaaggtgattgtttataggttaaaacaataaggtcttgaattagaacttcaacattgtggtattagagcttaactttagcctactcaattccttattcacatcatctcgatgattagaagccatcagtgccatcttggttcgacatgaacaattttgagtccaataagtttaatataatgtgtttagcttcttatctttactgcttagtaaagattagctcatgttcatgttcaattaaagttaatatgattaaattagggttcatgatgcactgctctcgaagcccgactgttcttgaagcccatcgcagcttgtgcgcccgcttcatcggaccgccgacaccatgtcttcgcatggtgccaccctcaggcgcgcctcctagtcggtgaagccatagccgcttgcgtgctccacctcgacggacctccgtcaccaccgtcgccaccatccactctctcgtgtcgccggagtttggatcggggagagtaggggagaaaagggattagggttagggttttcgcacccctcccctcttcggccggtgatttcatcggcacgggagcgatcggacagctcagatcagccccgtgttgggccaccaacgctgctagaccatgcaatctttgggccgcgcttagttcgccctgcgtcgggccgtcgccgatatatgggcgtgcatgctcgccgcgcacccatgctaaatgggtcggtccgatattttaggcttgtagtttttctcgttgcaacccacaggcactattgctattcttaagtaattaaaaaatttgtaactttccgttcatcacattgttttttgtccgtgtttttgtccgtcaacgcgctaattcggttgaatcggactcgagttcactagagagaaaacgcaagggtttatcggagagataaactcgagttcgagcttaatatgatagcgatttctacgggatttccttcaatttcttgaggggaaagatggagtagaagatatagaacaaaagccctcaactaatttgagattatctacacggttttggttgaatcggacgcgggattcgggtggcgtcgggtgtaggcagggttttggctggctggagcttgaagatgctactgtagtgactgggaagtaaaatagacttatgctgggacatcatttcctaggctcgattacaggagggcacaaaatggacttcaacggagaaaggaaacatgccagagacatataatagactgaagggagggaatatgaacttttgtatatttggcccaaacccaattaaatataattgttaaatgatgtttgtattattaaaattagcaattaagctcttgaaattccaataaaattccaaagagtgcaactaataatggataatttaataaaattaaatttaaccatatcattttatttctcacagttactttacttgtaaattgatttaattatacacctacctacttaaaaataccaaatatttcaggaaatttgtatttcaattaattacatataatgtaaatatttctcaacttttcctcgattttctggtctttacacttctcgttgcaacgcacgggcacttttgctagtcttaactaattaaaagattcgtaattttccgtttgtcacccctctttacgtccgtattttcgtccttccgtcctatcccaatccgaatctgatttagattttgtgaacgatggaaaaagttgcaaaaaaaataaagatgagagaaacccaaacttcaacaagtcaccccaaaacaccaaatacattgcgtccgacgccgcctctcgggattgggttgggcaccgccgccgctgctcgggtaggggaggcgccgccactcgccaagagaggggggagggcggcggcgccgccactcgggaggagaggcaccgccgccgctcgggggaagggcaccatttcgagagagagcgagagaggaggggtgggaaaagaattctagggttaggttttgggtgcccattatttatttaggttaggatcaatctggaccatcccttcgatcggacggctccagcttctcccgcgtcgggcaactggactattgggccgctgcactattgggtcgccgaagcacatgtactagaagatcgattgcaggaggacgcaaaatggacttcaattgagaaaggaaacagtccagacaaatagaatagacaaaagggagggcatatggacttttccatatttgccccaaacctaaaagggaggattttgattcttttttcaattaaataattgttaaatgatgtttgtattattaaaattagcaattaaactctggaaattccaataaaatttcaaagagcgtaacaaatcatggagaatttaataaaattaaatttaaccatgtcattttatttctcacacttgctttacttgtaaattgatttaattatacacctacccacttaaaaataccaaatatttcagcaattttgtattttaattagttacataatgtaattttttcttaacttttcctcaattttctggtctttacatttcccattgcaacgcatggacacttttgctagtatatatatcttaactaattaaaagattcgtaattttccaatcgtcacttcaattttcgttcgtcgcttgcgtcgtccgcaagacgcgatagccaggacttggcttccttcgttcctcatccaactgggcttaggtagggaaatcagatagggaagtccaccgcacggccttttcgggaagaagtaaggaatttgggaagagggaataaatcatattgaaatttccccgaaatctccaaaattaagaaccctaattcgattgtaagacccaatgccctaaaacacgaatcaaatccaaacaaaatcattaaatttaagctttgggtttcgaaaatttaccggcctaaaaccttgccttaaacctcggaggctcgctaggagataaaccctcctttctcttgaagatccatttacaacgaacaggcttcttttgttttggcaagtgcacaagctcccatgtgccattcttctcaagagaccgcatctcctcctgcatagctgagatccacttctcacgatctccagaaacaacagcttcagtgtatgtggctggctcaagagtattctccacctgttcagcacaactaaaagcataataaaccatatcacattcctcaataaggcggactggagctccacaactcctctttgttcggtgatgtgcaataggttcatcttgtggctgcaaaacatgagatgagtgctgaacagtatcattaacatcattaccaacaatttcagtttcctgatcatccatgtgctccacctacacgctaacatattgctgctcctcatcagaaccacctggtatgacatctgtgggcaagctgtcattaaacataacagattcattgaaaacaacactcctactcatgaacatcttattagtttcaagattccataacttatatccttttactcctgaaccataaccaagaaacagacacttaatagctctaggctctaattttccattatcaacatgagcataagcagtgcatccaaaaactctcaactgtgaataatcagcaggcataccagaccatacctcaatgggagttttcttattaagtgggatagaaggcgacctgttgatcaagtagcaggcggtgttagcagcctctgcccaaaaacgcttgttcatgcgagcgttggacagcatacaacgagccttggagatgatggttctgttcatgcgctcagccacaccattctgctgtggagtttacgggatggtgtgatgcctaacgatgccttccttcctgcagtaatcatcaaaagcatccgaacaaaattcaccaccattgtcagtgcgaagtacttttacctccttttcagtttgcctttctatcatgactttccactctttaaaagcagcaaatgtatcatctttatgttttaggaaataaggccacacttttctagagtaatcatcaataatggcaagcatataacgagcaccaccaagggagggcttacgagaaggccccccacaaatcagcgtgtacataatcaagtataccttcggtgcgatgaactgaggtattgaattttaccctcttatgcttaccaaaaacacagtgctcacagaacttcatgttaccctgagtgcagccatccagcaggttcctcttcatcaattctgccataccaagttcactcatatgtccaagacgcatatgccacaggttagtcttactaggttcatctttagaaacagcagcagcggtaatagaaccatgtaatgtacttcctctaagaacatataagtttgcagaattcatatcaccaatcatataaacgagagaacctttcgatacctttacaactccacctgaaccggagtatttgtatccttctgcatcaagtgtgctgagagagatgagatttctcgccatccctggtatgtgtctcacatctttcagcgtgcgtgtcatgccatcatgtgtcttgatctgaacggagccaatgcccacgatctcacatgggttatcatctcccatgcgcacaacatctccattctgcatagacttgtaagaactaaaccaatctttgttaatgcagatatgaaacaaacatgtagtatcaagtatccattcatcatgactagcaacacaaccagcaaaaacgacaagacaatctcctgaatcagagttttcagcactggtaacaacagaggccttaccatcagatttccttttctccttattctacagcttccaacattcttcaatgaagtgaattttctttttgcaatacttaccgaactttttacctctggacttagaacgacctctactttggctcttgtcacgatcattgctgtcgttgtaggctctctgctcagatctgcctcagacctgcaatgcttcgcccttagaggacgacgcatcagactgaaccatacctttcatcttctccctgttttggagcgcctcataagcttctgctaaggttagttcatcacggcttaaaagtatggtgtcacgaaaatttgcatataaactaggcagttagcataacagtaaaagacctaaatcttcatcatcaaattgtacctccatcgacactaggtcagcaacgatctccttgaagaccgatatgtggttcaacacagaaccactctcctgcaacttgtgcgagaacaacttcatcttgatatgcatcttactggctagatatttagacatgcagatcgattccagtttgagccaaagttctgcagtagtcttttcctgcaacacttcttgcaaaatatcattagatagatgaggttggatcagcaacagagccttacgatctttccgcttctcctcagcggtccatttagtcgatttcttcttcccgaagctttccagcgcctcatcaagatccgaagtttgcgccagaacagcccgcatcttgacttgccacagcaagaatctcgtcttgtagtctagcagcggtagatcatacttcatcgacgccatcgcgaaaccctaatgtggaaaacaagctctaataccacttgttaggaaacgataagcaaacaaatgatgaagaacaatagatcaatcacagaagacacgagatttaacgtggaaaactctcccaaagcaggagagaaaaaaccacgggtgccagccagcaaaatatcttcactatatctgaggtgaggttacaacgccgcacggcggcttacaagaggtatatatatggtggaaccctaaaagggatgacgctccggcccaagcctcccagcaacgggcctccgctccactacggcagaagctggcctttattaagtgcaaatgaatttggatcacaactcaacacctttcgcctcccttgcgcacaaaaccttggttcctccggctcccagaaaaccctaacttccccaattcttctctggccatctccgtcgtatcaatggatcttggagcctcatccatcgacacctccgggatgaagctgcgaatgaaagagtcactgcctggccaccaggatctagagcgatcggaaggaggtacagaaacccaaacccgcccgagggcaagttgtggtgttagaggattttattcgatgcggtttcctacctcctccttctaaatttctcctcttgattgtaaatttctacggcctccaccttcacttgaaccctaactctattgcttttttgagcatatttgctcatctttgtgaggcctacgtcggtgtagtgccgttccttgatctcttccgctatttttacaagctccgatggatatgatggagtccaacaggatctccaaatgctgcgggttccgtctccgagatggtatgaaggcggaatatatccccttccaatgctcctcatctcagagctcgtggaggtcaaggtggctctatcttcagaaagacaaacttgaccccgtacttgtcgttcccgagaacaagcccgagtggtcccctgactcgacctcaaaacattctttagctctatccctctaagcctttgtagacataattagcgatcttttaaaagggcgcttttatggtatcttttaaaaggtgccggtcttttaaaaggaaacataaaatactattggtgccgatcttttaaaaggatgcttttacggtgtcttttactgccaaatgtaggccctctttgtttaggcttataagccaacttataagtcgaaaagtctaagcctaaacaaacaagcagcttttccgtttggcttttttgaagccataagccactctaacactattaagccaaaagctaggttggagaagcttttttggtttatgtgaggtagatatatgactcaactactaaacttaggacattaaatccaccggcttataaatcatataagccaataagctgacttaaaagtctaggccaataaacctaagcctaaacaaagagggccgtagtaatgtggcttttacggtatcttttagagtatcattaaatcggaccatcggaccattgatttatatgggtactttagacttttcgttaaatcagatcagtaatgtggcatttgacttttctaaaccaatcatacaatgagtatctctcgtcattgtcctcgctgcatgtcattactgacgacttgatcagccagcgtcgtcgacaggctcgctgctatagcgatcgcaagcatcgataacatctctacccgtgggccgtggagccagattttgcttctgagtatgaaagaacgaatatgaatgcaactgtgttgtttacctgtttaggataatcgattgatttacacttggcatgattatgcaaatcttgtgttccaccaaaggaggaggaaaaagaaattaacagggcagtggctgcctgcgcatgcttgggtagcatggccgaagaaggaagaaagaagaaacatgcatgcatgcgtgttgtaatttggataattatctttcaaccgaataagcagcaattaaataacaaacagataaatcactttcataaaatatatcaactaataaaacaagaaatcggggaaaatatcctcgtcgacatgcatgcacatgctgtccgggaaaaatgggaggtagaaacagaaattcagttgagacgaagatcctgtattttttccaattattatacccatccaccaaatttactgtcacgcatagtatcgtgtgtttaattctggtgcgttagatccatccacttaaatttggtaccttaaaaaaaatccttttaaaaagaaccatcaccttacagtaatattccctccgtttcacaatgtaaataattttagaatttctcatattcatattcatattgatgtttcctctttatgccgcggccctccggcatggcccctccggccccggtgcttttttctttggcaccgtccctccctctccagcgcgcccttccagctccgatgccttcatcgaggccaccggatcgacccctgcgccacctccttcgccgcaccagagaggagggagacgcgcaagtttagaagaagggaggggaacgtggagcttcagaccgtctgcacatacaacattaaaagcatttgatttctgcacctgcaaaattatgcaacgcatggaatcaaatttgggaagcgaagagttgcaccggtagattgcaggtcatggaaagatagtatgttcaccttctactcactcataagtttgagtcagcaagttgcggcattgaacccattacccctgcagtccagtctgaaaagtgaacacctgctgcgctgcttgtaaaggcaaatatatgaagaacatgattaaaaggcacatcaattaatatgatggcatgagctcacctaacatggctattcagtgtatctctgttctcctggacagaaatcatggtggtgtgtggtcagcacttctcttaggaacttacctagaactaatattcaactgaagatgtagatggcactgtattgaacttgaaaacccttaagagtgattgaattatattgggatcaaattaaggggtgattcagaatgaatttttagtggtagcaaatcaagagatgattcatacaaaatgatgacactgcaaaaaaacaaacatcatgacaccttgctatgagcctgaaaaccaaaggcagcatgcaaaaagttaatcattttttctgcaacaatcctgtattatgtcaaacttcccaagcaacatcatctttattttagctgctacaagtaatatcaggtaagaataaaaaggagaaattagaaaacattaattttggcttaataaagctatgttctgaaaatacattccgtacttataaattcagcactaattaatttggaatggatatatacttcaagtgatagtaagtgtgttcattgttttccctccataggacgaaaaaaaataatccaaaatggacttttcgaagattgtgggggctattaatggcatcaatgagatttccactttatgtaaaatggtcaaagatatcattaaatcttgctggagtggcatacgggagcaggagctgcaagacaaagtaatgaagttggagaatgacttggaacgtttcagagatattcttcctgcaatgtacaacctcattgatcgagcggaatggacgatccacaaagaccatgtgccagagcttcttctgaaactcaaggatgcagtttatgatgctgaggaccttcttgatgagttgaaatggcatgaactgaaggtggccatggagggctccgcaaacaaatctcctcttattgacttccttgatagtgtcattcaaggtagtttcaacaaagtgagtggtacctatgaaaaactgaataatgtttctagtctgctggagaagatggggttacatgaagttacacaacactttgacaaatccttcaggcccgagactacctctttcccaactgaaacagaaatgtttggtcgtgacaatgaattggagcaggtgatgcaatcgcttggagtacctgctaaaggtagccgggtcctttccaaacgcaagaaaccaagcagtgcaattaatgcatcaccaagcacatcaaaaacaaaacaacataacggtacacaaatgagtgatgaatcaggaatcacatgtattcctgttctgcctatatatggaattgggggtgttggaaagaccactttggcccagcatatctgccacgattcacgggtcatgtctcactttgacccgattatttggatttgtgtttcagatgactttgatgtgaagaggttaactaaagaagccatacaatcctgttctacaaaagaagctgataatttggattatcttcagcgtgctctttcagaagaagtgatgaacaaaaggttattgatcatacttgatgacatgtggggtgatgtcttgagggagagtggacactgttggaagaggttttgtgcacctttgacgaatgcgctacaaggaagtatgatgttagtcaccactagatctccagatgttgctcgtgaggtgcaaacaatggagcccatccgattagaaggattgcaggatgatgtcttttgggatttcttcaaattatgtgcatttggatctaagaattctgaaaattacccagagttagtgcacatcggtaaaagcatagtccaaaagttgaagggtgtacctttggccgccaaaactctaggacgcctattaagaatgagccttgacactgaatactggaataggatactaaaaagtgaactatgggagctgaaacaaaataatactgaaattttgccagcgcttagattgagctacctgtatttaccaacccacttgaagagatgcttctcattctgtgctgtttacccaaaagatcacaaattcgaagaggataatttagctgaaatttggattgcagaaggctttgtgcaacctgaaggtaacactctaattctagatactggcaaacagtactttgaagaccttgtaaaccggtctttctttcagagtgttggtggtaataaacatgtaatgatctgttgcatgacatggcacaactagtttcaaaggatgactgcttcattttaaaagacaaggatgattttgagaaggttcctccgagtgttcgtcatctgttcgtactccctagcatagcctttgattgtactcagttgctgagcctatgtaagcacacaaagttgcgcactctactgtgctacaggtctttacagaagcaaagtctagcttctgttatggaccattggtgtagtaaacttcagcatatgcgcgtggttttgtgtgcccacacaaaggagctaccgaagagtattgggaaattgaagcatctacggtacctggaaatctccggagcttgtcctttcaaaagccttccctcggagttatgtcacctacataatttgcagattttttcagctcgaaaatgcaaattagaaagcttgcccggtgacttcagtaagctatgcaatttacagaggttcgaatcatgtggatttaactctcccaaatggagaaagtcattttgatgcatccactgggcagggagtcggacttacattgatgaagaacgtgaaccaaatttgtggaggagtgacgataaataatcttggtgcaacaagcaaggatattgcagcagaaagtgcgataaagaacaagaaaaatcttgacagactgaacttgaaatggtcttctgtgagatcgcaagaccataatgacatcgaggttcttcaagtcctaattcctcctaccagtctcaagtgtctgaccctctatggttatctaggtcaatctcttccaaattggttttatcctcataatctgccaagcttaaaatcccttgagtttcatgattgtcatagactttgtagcttaccattttatggtatatcaccaccgtgcatcaacctaaatgaggtacccgaggttccaattgagaacggtatgggtagcattggcgtattctcatccctggtcgacctaaagattgtgaagtgcgattacttatcaaacctcgacaaatttatacaaccagcttgtataccggctatcaagcgaatcacattacaaagattaacatacacaaagacaaaggtattgcctctaccaattggtaaatttgattgcctcgaagaattggacgtggctggttaccagatattcaatgcttcagaaagtctgtccatgcgcactctcaaggagctcaagctatgcaattctggggacctcccatgcttttttgagttcccctcccttaccaacatgttcttagtcgtcttgcctgtaacgtccattccactacgagtgtggtgcagtaaccttccagctctacttcgattaaaaatttatagctgtgcgaaccttgaatttattggggaatcagtcttcactggcaatcgtcctcaaagagacagttgcagcactacaacattcgcatcccttatttccctagaaatttgtggctgcgaaaagctgacaagcattgatgacctcgtaacgcctgagtatcttcctgctattgagaaaattgatgttagctcttgtgtcaagctatcgtccctgccaggtgaaagatttgggaatttctcagctctaaagcatctgcgtatttcttattgtggaaaactcaaatggaagggacttgttttaccatcgaccctccaaagcctctgcttaagttattgtggggatatctctccctgggttcccagttgcctggagaaccttgcctccttggtgcgcctgctgattaactcttgccaacatgtacaatacattcccagttcactatggagcagcaatctctcatcactccaggatttgcgtattttcaattgtagtgaccttgtatcaattggtggagcagatgcaattgtgaaaataaacaaggtgaagatagaaaactgtccaaagttgcaggaaatatagcaaccaatgagcagaggtggcctgtagatttcatgatatgtatgtgatatgaaagttaaaggattcagtctctgagtctttatggtatgtatgtgataaatccaaaaatttcccttccagctcttaccaagattttctttttctacctgacctagaagaaaccattgtgtcctgaactagtttgcatcctatatgagtatatatcatcatcagctacctgcacaagcacaactttctgtacatactgtttccattaattagttgcttccaaaccttagccggttacagtacatccttaacctgtagtaattacatatgctttagacagtttaaaatttaataagcaaaagaacttgtatcctgacatagattaaaatttaaacagcaaataagacttacactctacccaactgctgccagaatatattgtgaagtttaaaacattctttttttttctattgagtgcactgtactgattaaagttatctttttaataatggaggatggagcaactggcgagatggagctaatagatgcatgactgttggagagctaccggcacttctatagcagaatctcgccatccatattttcttatactctgttgtcctgtttccgcataagatgacttcttcttatcaagaaatttactgggcaggcataatgcgtctgaaaggtattgcacttgattatgcgacaagtgtgttggaaattcctgtttttgtgccaaataagtggggagagagatacataccatgagaacctctctgttaagatgtgtgcatgatttgattgtgctcaaaaggttgtataaattacaatttcatttgtgatgtttttggatgcgatcttgttaagctcatactagaaccttcgagtgacaatatatgctctatgtttttttttggtagtaaaagcgtatgatctgtgtcattttgctgtgctcctttgcctttttttttctacacgttagttattcacctttcagtatatcagtttgactaataagtgaatggtccctaaattctatgggatgtacttgggtaaggtgttcttgggtgcattcttagcttcctttggctgccaaaggaacatatagcaaacttgtcaaaaacacatttaaattctaggagcatatatacatacgtgcatgtggatccactggatttggtataaactccacctggttgatctcaacacatggagactgttgttttctttatggctgacgtttgatgataaaaaaactaatgagaatgctcacatttatttatggatgatatggagccacttcagaacggactaagctggaatgtgttggcagcttatcactaatagtatcgacttgtgctccttcatgaaccttaaattaagcatctgcagaatccaccaaacgaacacccgataagcacaacggaaatgtggaaaggaccaaatagctttccaagataagcattaattcgtaccaattttattgcctgttcatgtttttttccccttaatcagttgtaacatatgcaatggaagatttcaggtgcattgataacagaacatgattgagcatttgatccgcaagtcgcacaaaatattatatttccaccagattcgcatcgcatttgacatttaacatatgcgtgcacaatcaaactaaatgattccacaatcacgtccgtctcttcaaaaggagactagatgcggattttcacttcagttttttcgcaactactccattattacacaccctataactacaaggttacaacgagagtttaattaaccatggggcacgcaccttacggccatgtcgaacccaacggcggcggggccgctgccgacgacggcggcgtggagcggctcgatcgagcgagcgcgtggcggcgtagggcagaggaggaggaggagaagcctctcggtcggtcgcgagaacagcagcagcagcagcagcctcctcaccgtctcggaaacgcagtcagagttggcacggcggcggcggcgaagtacagcagcggggagagacggccgcggccggggacggggatttcggggagacacggacactccacaaagtggggtaccctgaaattatgtcaggccaccaacattccctctgtacagcgacagccgcacccaaattctaattttcaaaatttataattttacaaattttaaagttgattttgattttttttcatcaaattttattttttatattaagatttaatcgtccggaacgacctatatacaaattttacctataaattattattattttcataatacgtcgtattatcggcatttggatgaaaataagggaatcccataccttaacagacctctcatctacaagccttggatgaaaaaaagtttatacatgtctccaaagtgaatgtttcatgacgtaggtgagtctaaatgtatattctgcactgattcgctgtatactgctctatgagccttatggggtggtgagttgtgaaagttcatttctccacaagaattggatgaaattttgtatttttgtggcatgcttttcaaactgttaaacggtatgtttcgtgcgaaaactttctatatgaaagttactctaaaaaatcatattaatctattttttaagttcataataattaaaacttaatcagtcatatgttaatacaacctcgttttacgtaaaaaaaacttaatttttattttcatctcgggagaaaagaacaccacaaggtgttagatgaaatgagcagtaattaaaaaaaactatattatcaccgtaaaggcacattgctaacatgcacaagatgcacgactgatcaagaaaaacaacgggacccggagtcgcaatatttggttaatgaacccaaagtagcaggaaacgcgcacgcaggcaaggtgttcgacgaaaggaacacataagcaaaagaagacaagtagcgaaccttgatgcccgggaacgacatggcgagctcctcctcggggatgagtacgggccacttctttgtcttctccccgccgcggcggaagagctgctcggtgtcgaggaggcgtccgccggtcgaggatctgggtcgcggatcccctgcacggcggcgccctcgacggggaataagttcaccggctgtccctcaactttacataaaccataaaattagaaatgtgtacccctaaaaaatattagaaatgtgtcctaaggcagtaaaaaatattaaaacctctaaacccttaaactaggatgccacgtcagcaaaaaagaaattaaaaaagcacgtgggcccacataaatgtctcttttctttttctcttctcttctctccttgttctctccggcgcaactgcagatgggggagaggcggtcggcggagagcgtggcaccggagatgcgtggcggaacgacaaggagtgcgcattggctgtggcggcggcggcgtagcagaaggagtggccgagagcgtcgtctaggcaaggctccacgtccatggacgccgacgccgcccgcgagcacgtgcacgcggttagcagtcgtgatgcgcctggggcagagtcgatggcgcagcccaccagagtcgtcggcggtgccatggggcagagttgacggcgcggcccaccggatctggcatggtgaagaggagcagaggcgacgggtggtggggcggagtcggaggcggcgtggtggggcggagtcggcagcgccgacgaccggcgccgctgtcgggccgacgatgaccccatcgacgacgaggatgtgcgaaccacctgctcacgacaccgacgatgaccccatcgatggcgacgacgcgccggacggctggaatcccaacgacccaccattgccgatgcggcagtgcatcggcgagcagctccctccgtcgccgtcgcgccggccgcctatctccccctctcccgccgcccccgctccatcgctcggcgtctctctctccctctcccgccgcctccgtccccgctccgccgtcggtcccctctctccccctctatcgccactggcaggccacgctctctctcatctgcagctgcgccggagagaacaaggagatgataagagaaaaagagaaggagagatgtggggcccacaccgttttctctcacatgtgggccccacacacatttttatttttttttctaactaggatgccaagtcagcgaaaccacccatatatactgtcttgggatattttatgcacggttttacataatttagggatacatatttctgattttgtggttaagggatctaaaaaaatctcggtgtaaagttgacacacggccggtgaacttattcccctcggcggcgacgacagactcctcgacgcggttgaagtaggtgacgattcgggttgggctcggatatgacgggacggcccaagtaagttaagcaatccgacgttggcccaagtcgcgaagaaataatccgacggtccaaaaaccatctacgttttggatccaacgacgcactgatcatccccctctccctatgaaaagccctcaccgcctcgcctgattgagccgcgagtgccgtcccaactcccaccggcaaatcgcgatccttggcggaggaaggagcagcacgtgcgcggcgacggcgtcacggcggaggaggatcgaggaaccacttgacgaaccggtttatcgcgagattcgtgtgaataaaaggttgcctttctctgatgtgcttcttcaatctagtctttactctttagcctgtagggagacagtatttaagaagagagaactctattccattccacttttagtgaataaagtagtacaaaattataattctcttttgttatgctatctcccagaactaaactattcctcacacttcatacctcatatgaacccctttgtttccctccggtatgacaatcgttcggtcgtcgctgctcgatctgtctcctgtaacttgatcaggagcgggcgtcttcagttgtgaattcaagccaaatatcgcatattcaagccaaatgtgccaaaaaaaagtaaaaaaatataattgaaatgtagcaatatatctcacaacatcacagcttgcttaaaaccaacatttaagtttgaagttacgaaagttagaacataatcaattaatcattcgaatatcttacaatagatagtaggtagaaaattacaaaacactacttttctactccgaatcttcacccgagcgcgccgccatcacgcgagcccgccgccggcgtcgtgagggagagtggacgggagagagggcttagtgggagagaggcttgtaaaatctactaaatcaaatagaacaaatatcacataaaattaatattcatacaaatcaatttttctttggaaaaaaaactcgatgatctggaaaatgaaatgaagaaaaaaaaactctattagaattagagggaaaaaagtaagaaagcaacataccggaatttagcatctcttaattttcactgctattgttcacctctgatctctcgtatgcatgtaacacaaggtcacatcatgcatgatcattcgattcgatgcaaggacacatgcttgctatctctccttcccgctcttgcatgaagagtccgaaacgaatcaaacatggtttgagaataattgagcatgcaagggactctaaccggtctcgtacagatcgcactgtggctctataaattgaaataggaagttttgtgtctttggctaggcgagaagttagactatatttctgattttatatttctgtgctatcacatgtaacaagacttgggcttgattgatgtcgcacggaagggacgtcacatgttatgttaggtgggacgacgaaaacaggtatgctaggtggggcggtagaaacactacgaatcttttaagtaggtaaagataaagatagggatgcgctaaactacgattaaagataaagatagtagtttgtattctaaataattattttactaaaatataaaagtaacgtgtgtgagagcagtcataggtagggatggcagtcgggcacgacgggcacgggtagtgactgcccatgcccgtgcccgcaaggtaatttatgcccgttactacatgacgggcaaggagtactttccatgcccatcgcccgcgggtgccatgtgacggcgggcatgcccgtttacctgtccaattatatcagttcaaccataattcccacaagtaaagacaatattacaatttaaagaaagggtacagttgtaccaagttcaatacaagcattacaagttcatcaatcacaacttcaaatgacatagtttagcacaataaacaaacttcaaacgccggctgctactggccggagtacttgcatgcttgctgctgcttgccggagttaccattagttcaaatcactagcaatcaaatcacaaataacagaacaaaatcaagagagactagatcgagaaaatagatacctaaatctagaggagagaaggggaatagatggggaaaagaagggcaataccttgccgacgaccggagggctggaggaccggaggcggcagcgaccggggggaggggggacctccgtggctcggcacagtggaggcaggaggcggcggcgacagcggccgcagacaaagcgggcccggctagaggaagtcgacgaccgaccggtggggagctcggcgcagacggcggccgcagcttcctcccgaggtgaagcccctcctgtcccctctggccactggctagcccctcccgtcccctcctgcggccatgcggcaagcctctcccgtcccctcacggcgacaactggctggctggggtgggggcaccagcggagaccgaggcggctgggaggaggagtcgaggagatgcgaggagaggcagctgggagtgggaggagggagagaaaccctaaagattttagatggtgatttttatactaagttgactgagggcccacatgtaagttggtttcgcgggtaaacgggcgaagctgactacccatgctcgtgcctgtgtgcccgctgggtacaggttttaacccaataaaaaacccatggatactaaatggagaacaaacccaactctattagggtttttacccgtgggtaaacaggcaaataagcaaaactgccatccctagtcataggatgttgtgccttttttttgtggatttttttcccctgaagtaaagggatatcatgggtggtagttcaggtctaggtattgattgattgataaagtgtactcctggatccggaataaccggcttccgtactatgtagaggaggagggtggttccttccacacagtggactcacctttgcatatctgaaatccaccctttctagtgcaaatgcttcgccggtaacccaaagaatggagtcgctgataccatcttcttcttcttcctcatcatccagattaagagttggcggtgatcatcccgggagtcatcatgcgactgtcgggcagcctggaagtacatcagcatcgccaggatccccaattagaggggttcggcctccgtgcgttgactcatgtgccatgaatacgcctgataaggatgttccgtacactcgtgtatgtattcctgaacgatgagtgaattactttgaactacttttccatgtttaactaatgaatgatgtatcggacagtagttgacgttgcattgcagaatattacaattttatactttccaaattttctttgtctgcaatttccaattatggtcatgttaatggaagaaaaaagttgattagagggtccccatgttagagaggaaatggtcccaaaagtaggaatggtttttgggtcgtatggagagacatacaatttttacgatagatactcctaccatgctggttttgatttgaaaaaaagccgcatgaaacctagttacagagagagatttgttgcacctgtgaggggaagaacaaatatgttgagatgaatcaaaaagtgagcgtaggcgggtttcagttaggattttttttttgagcgtaggcatatgttaaggtgaggaatttttttagatgaattgtaatgaagatgtcattaaataaaattcatcaccttaacatatgcaaaaaaaaaaaaaaacctaactgcaacccacctacgctcactctttgattcatctcaacatatttgttcttcctgtcgcgggtgcagcaaatctctctgaaactaggtttcttgcggcttatttttcaaatcaaaaccagcatggtaggagtatctctcgtaacaattgtatgccttttcatacgacccaaaaagtacacaccttttcatacgacccaaaaaccattcctacttttgggaccatttcctctctaacatggggaccctctaatcaattttttttcttccatcaacatgaccataattggaaattggacatatagaaaatttagaaagtataaaattgtaatcttccgcaatacaacgccaactattgtccaatacatcattaatcagttaaacatggaaaagtagttcaaagtaattcatttgtcgttcaggaaaacttacatgtgtgtacagaacatccttgtcaggcgtcatgagtcaacgcatggaagctaaaccactccagttggggatcctggcgacgctgatgtactgctaggattcctgacatttgcatgatgactcccgggatgatcaccgccaactcttgatctggataatggggaagaagcaaaagatggtatcagcgactctattcttgggattaccggcgatgcatttgcgctagacatgatagattttaggtatgcaaaggtgagtccactgtgtggaaccaccttcctcctctacacagtacggaaggtggttattccggatccaggagtacacgtgatcaatcgatcaatacctagggcttaactaccgctcacgatatccctttatttcatggaaaaaaattcagaaaaaaaatgcacaacatcctatgattgctctcacacacattacttttatattttaacatcctatatgttacaaacaacaattagtaactttgttgctcgtatcgaaactaggcatactcatagtaatttaattactcaactgcaccttcaaaagtataactgcagcttcaactgtaccgcatttttttgtgcggggccaatcaaaatagagtaattgagttactcatcgaacctactaatattgaatgtaatatagttgctctatgtaacctatcactgttaccgcgttgcaacttctgtgttggttgtgtttgtgcgtggcgtgcctgggggagggggggtctatgtgaggggagcattttagttatcgtgcaccccaggcgcggtttagtgcatccctatatacatatacatatacatagtggtgatatgtatctagcatgctcgtactaactaattttaattgatttgctatttaggatcgacgggtgacgcattatcatggcctttatgtacgaacttgtataggtacttcacagatatggcacttgggcaaaaaatatatttcggagaagtttaagcgtacgctcatgttaccaagttttaaaagagggccttaccatattaacatatcatattgatcatgaagccagacaatagttaatactcctagatagatatgataaagtaatttgcgcagagataacatacaaagataataaccctatattgcatcatctagtcatcaagcatatgcgcattaccatgtgatgaactaaataaaaagtgtgcttgcatggtcgacgaagagcgttgctttcactatcattgacaattctatcaacacaaggaaacgacacatactctttatacatgaggagagatgatggacattgtgttaagatcagaggtgcaaggttagacaacaagtgggtggtcccatacaatccttgactgcttatgtgatataattgtcatatcaatgttgaagcttgctcaagaataaaatctatgaagttatataagtatgtatataaaggtcatgactatatattgttctcggtcgactcggctaagggaatctatgaaattcatcaatatagggatgctagaggcgtatcaccaatgtgaactataagtatgtacaatattattagtttccccctgttcggtatctatctagttgtttctcagctccaacttcatttgcctaacatgcattatgttacctatgatggttttggtaatcttgagaatgttgtcagcaggccatctcctataacaacacttattaagtatttcgaaatgaatcgcatagatccggatgtaagtttccttattatccaaggagtttcccagaagaatattggtggaccaaggtaaaaaagtatggataaaaagaaaaataagaaaggtaatgttggacttgattgtgtatgtgtaccctataaaaggagagagaactacttaattaggagtgcttttgaacatgtgagaggtgcaacctcatatgaggatttgagaacaatatctggtttcacatactttacctttaggaatgcatgcgagaagagcgagcttatgaagacggacatgactgccaaaatgctagttgctctacgttggttatttgcgactacacaagtattttatgagaccacaaatattcgtgcactatgggacaagcacaaggatttaatatctggagattacaactacaataacaccaacctagtatagcagatagtgcttagagacatactacgtacctctgtcccaaaatacaggatgtgacattacctattactacgaatctggacagtctgtccagattcatagtaataggtaatgtcacatctggtactaggtagctatattttaggatggaggaagtacatcatttgcttcattcaatagggaagtatatcataacattatggcctttccgaggtgagattatttttataccggtatgttttatttttattaaattttattatcctatttaccaataatttcttgatgcatttatttgttcttgtcaatcaagtaaatttttcaagaacataatgatgagcaatgtacaaaatttgatgagatcatgtagttaataagaagagctaggtttttttttatcgatggttcaggtgtcatcggaaagatatttctctacaagatacttcttgctatatcgcgattcgtgggattaatagccattgcaactatgatgtctggtataataacgttgatattgtcggaggatgcactgaaaactcaaggttcaaaatacccattaagcttgctctctgtttgcgatggtatgaacatatattcacttgctctctgttcatttttcctgaattttgtatagttctttgtgccaactcttttacactgatgtgactagatactacacttgttttttttccattatggttgggcaactaaacaaccacttcctctgatatgttatgttcaagtctgatacgtggactgatatgattagatatttatcacatctcctccagtgagaaaatgccagtgatgattgcactatgctgatttaacatccttctctgttgttggcttgttgccttttccttcattgttttaattgatagcgacaaatatacacatgatcttggtatatatttcgatttggccaggaaacgaaatcagttagttttagcttgcattttggtatctccttgtaccctaatgcaagtgatgataaagtaatgcacaaccttgctacaaatttgagatcatgctacttatacattgttccttacagggctcatgagtttgaagatgtctatacaaagctaataaacaggacgcagatgacatagttggtttaatctcgtatatgtatttaactacatgtttatctgattggttccttattgtggaaaacttgccaatgatatgcatacccatatggttattttaaattgtcaaatatacaagcatattgaatgagatcatgtatatgtatttggttatagtaatcacataacgttttgtttgagctagccagacaagaaaacacattgagatacagtaacatgcaaagtgcatgtgttctttaaataaaacagtgaaaaagtgagtgtgcaaaaattagatggccacatactcaaaacaaaaatctaatctgtaatctccatgatggagtaacatcactacccataaactgatttagggataaattttcatccacaaacttcacggtgtaaccttccaccacaagagaagttatctacactccaaatgtatcaatacaaccaacatctcctacatgcaggtcagcaggtatgtctttccctctacctttgctgcaaccaacaacatctaaccatatgcagactcatccaatacaggcaaccaaacagcttcatatgtctttccttagtctggccaagttcagtatgaacgagggagatgagtcaagctagagagatgcagagaacagaatatgtcctaagatattttgatttaactcagttctcttaacattcacctaaaaaatgtattatgttcatgaaaagaaaaacatgtacgagtcttatgactattattgtttaaattcagaatttagggcagccagataagaaagcaaacatatagtgtgatcttattgttgttacagtcggggcggagctacaatgattcctatgtattctcaggaatacctaactttttttatcaagaaacaagtatacttcaacatatacacatgtacacatattagttagccaagtactcttcctcactaagatgtgtatagatgaaaggtttagaaagtgaaaaatcttgctgatctttccattatgattgttgaaacaaagttacacaatagacatgagattgtttagaagcttctcaaattggttctagaacttacattagtaacagctagtgttgaaataatcttttctgccatgaattatgtgaagaataaattgagaaacaggctgggggatcaatacttgaatgattgcttggtcacatttattgagcgtgagatgttttcgaaagtcaaggactgtgatatgataaaccgctttcaagccatgaaggaacgcagaattaaaactactcttccaagccatgaaggaaccgaaatagaaaattagaggtaccgtgtaataatttatagttttatttcttcgattatcgatattgacatactgtgaaccattgatttttttttactatgaactttttttttagacgggaataaccaactttgaaatcctggctccgccattggttacagtttagtgttgtagcatctctgcacgaatgcactttattagatcaattttaggaatatgccggccgcatgatgataaaagataaccagctgctgtttttgcataaccatgtctgagagtttggcatgatagcagatggacaaaataaaaccaatcaaagcacgatatttattcgtctgtctctgttctacaacgcaaacagagtactacttggtgaaacgaaaataccaagcaagcacaataccaaaatcacaattcaagatatatttttagcataaaagccataaacgatactaattaatccaacaatagactaataagaagtcactgaaacgtgcatttaactgcagactgcgataacaacttgcattttctcgacggcttcaaaaatacaattcaaccctgatttgatcacttgttcaaaccccgtccaattcaggcaatagcttcaccccgatcttcataaaatttcatcaacccaacctacagagagcaggggatatttggtgaaattatcccaattaatgcagttcctaatgcaaatgagtagaaacttacctcccatgctatatatagtgcttgtgcttagatttcagatgtcatttcaaatcgatcctgcccacgaagttccggggcataccctggtgccgtgccaaaacattcctgtaaagatagatgaccaatctgcatgtcaatttaaacatcaaagagcatctactatattgcttattggaaagcagtgcaaagacattccgagagcactggcagactcatgtatgcgtgcaagtatgtgcatgataacgcgagccgagctgttctgctccgaaggagcttttgcagaagtagagttgccccttgcgaaagctttctgtgaacacaaggaaaagtacatgaacgacatgctattgcagtgttgttagatgactaacatagagaaagggagaattttatcttacgttaatactcaaggtagtagtaacatcctgcagctttctgctcagcatcctttatagagcctagcttgttgatcctaggcctgtaggttgtaggatctttcctaaatgtgacatcaagatgctgttgaacacagagaaagtaaattcaagcactttccattaaaatgcttattatctgtcggaaatattcagtacttatcacttgatcctctaaaaaagcaacattctgactgtgtccatgttattttcaggaaacctttgcatgaaaattcagggctatccactatcctcacttgatataacgcaggaggcagtagaaagaggaatttgaacttaccgaaagaaaacggttcatcccagaggccaggggttctggtgcatttgcaatacagtcaacagaaggttttccctcaaaaaccaccaccttatcagcaaggtaggttgccatgataaaatcatgctcaacaacaaaagcagttttcttttcatggaggataaatctttttatgaccttcgctgcaagaaggcgctgctctgaatcaagatgggcacttggttcatctatgaggtaaatatcagcaggctgcaaaccaaatgccatgtaaaaatcaatacttattgatgcactgtcgagatgaccaatagttatatagactatattccttgagcataaacttttctaactagggattcatggttcaaattacaatctatatgcatcattaacaataaacatgtttaatagaaagaatgtactggtagttgttctcttttctccttaatctgctgtcaaaagctgagaacgttcttacaatagttaaagaaatatgtgtcagcttcatagcctagacaaatatgctgcagtgttgtttaaaaataatataattatatactattatggctcatctagtttcctcgaaggaaaaatggagaagaaaaatgtaccaacaatccacaaaatataatatgcaattctaggtattgcgaatcagtattgtcaaactattttcccacctaagttgtagagatattgatgaataataaactcatcactgatgcttgtgggagagtttggtcaggaggacacagaaatagtgcaacacatagtctatgcttcaaagtttaaaacatactgtaaagttcaccataaaagtagcaaagtaaacttgccctcctattgttggtgtgattaattaattttcgtccacaaaagtatatggaacagcataagcacttagatatgattgatgtggaaaaagaatttagcgaatgaaagatagttgattttgcagagtctgtagtagtgcacagatcttctttccttgagaaacaagcgctatacagcctaaatgaatttttgagatataaaggtcctggtttcttctcaaaataaagcattgggttaatgcaaacaaggtatttttgtctaacatctgaagggcttaaaatacataaggaacttttctacccacaacaatgatttgaaaagagactgtagcggggtaatccaaagttattaccttcccaagacaaagacaaagcgcaaccctttgcagctcccctccagaaagagttggaacctgcctgtccatgagttgctcaattttcagtggtttcatgacatcagatctgaactgggcttgagtgcatgatccaggtactttctcgaatagaagatccctcactgtagagctatatttagatatcaattcctgaggcttgtatgagacagtgtattcaggcacgtcaacttcttcgtctcctactttgtctggcttcactcgtcctgcctgaaattcagataagaacaatcttgagggttataatcaaaagtagagatgttcgtattactgcaaaatatatttgacaaaaataaggtgtgtaccagcatacggataaatgtcgtcttcccagtaccattctcaccaagcattacaattatctgggaatcattaaagctgccttcagtgactgatagcttaaagccacaccttgtctttgtcattgtaggatatcggtagcattggtatgtctgaccctctacgatttcctcagtagactcggtaacctaaggaagcaaatagcattgcattagagtcagaacacataagaattgaagttatggtgctcataatcatagcccttactctaaatgtaagtttctcctcgcggaaacgtaggttttctgttggtataaagccatccaggaaaatgttgattccttctctaacagaagagggcaaagtaacaacaccatatgctccaggagtcccataaagacagcatatatagtctgataggtagtccagtatgctaagatcatgctccacaacaattacatagctgcaaaaaataaaggaaaacttgcttgtcaaatgcaaagtgtgcagtttaaatgttctgatttggtcaaatgggactcttcttactttttgggctgaagcaaagagcgaataacttgtgcagctttcagcctttgcttcacatcaagatagcaggatggctcatcaaacatataaacatctgcttcttccatagcacgggcagctattgcaaatctctggagttcaccaccagatagagctgagacatctcggtcaagaacttgattcaactcgagagtatcacacagtaggtttttcatatgtctctcatctttcttgctaagaagatctccaaccttccctgtaacagatttaggaatgtgatcaaggtattgtggtttcatagttgcctgtaaccaattagaacgcattagacagaatgtgtcacagtaacaaatctgaccattactatgtaagtacaactataaagcaagttaaaaggcagttaaatcttccacgtcagtatttagcttctggataactgaaatgatttaaatacttgaaccatgatcatcagagcaatgaataatttggatgatatgtgactaagaaacaaattctagaactgaacatgtttaagggaaatatcctaaatagttacattacatctgcattccaactatattcaaattccatctaacgcgttccaaacttagtcaaatatatatgattgataaacgataagtcaaatgagggaacaggtaataaccatatatgcaccagaaaacagaacattgtaattttacatctgtaggggaaattttctgataaattctgtaatgtaccttcattttgtcttccagcagacgagtaaagtatttctggagttcagatccacggaaattcctcataatttcatcccaatttgggggatcctgcaaacacaataaaaagtttcataacctacaattacttccattaacaagtacgtataacaaatagtgctctgtgttgcttactgtgaatttacccaagttgggtttcaccttccctgccaaaattttaagtgccgttgatttaccaataccatttgtccctaccaagcccaacacttgccctggtcttggaacaggcagccttaaaaaaaaaatcaaatcaagtttcaggaaggtagttatgtgtgagaagcatcgtaccattgtgtatcggtaatagtttcatggaaacaacattaagctaatacaatagtgtaaaaagttaaaaaaatcaaatacagctcaaagaaagctaggtggccagtattaaaaataggattttgtacctgtgaagcttaaatgaatttggtccatagcgatgtgtcgtctccttgtcaagatcacttggcaagtttataatctggatagcatcaaagggacatacctgaaataataataacaaaaaggaagcaaggctaagaatattgcacatttggaaagaaaatacaaaaaaatgaaggccaagcggaaaagcagttacaccttcacacaaataccacatccaatacatagttcctcagaaattaaggatactctcgatgatggagtaacttctatgcactgacgccctgtcaatgtagataaagaatcataagccacatgcacaaatacttgtatcttctctatcaacaaaataaaaagcctttttccttggtctgaaaggaaaatgtacatatgcagtaaaattaatggatatagaacaacaaaaggaaaatgtacagatgcagtaaaattaatggatatagaacaacaaaagataaatcctagtgtacagagtacgaatgaatttatctgagaaactcaaaatttatctcaaaaagatcgaataccaaaataattaactacattaaagtgtgactcgaaggcataactaaaccaataacttcagtagacatataggtcagcatgttcacatgaaaaataagattttcattgttctgaaagttcccacttactcttgggagcaggtaataggatgtcactgctttcattcatgtgtgatgtctttgcgaaatgactaattcaaagcatattattaccggcacgaagtaggagcagatttgaatgaaataaagctcatttcatctatgaatatagatagatattagaaaatatggcattgcaacagagggggatcccttatgccatttggactctttgaaatatatattcgtgcatattacaagaaataatcggtgccaaacaatttcataatggtgaagtctctggtactactttagtttgtttagattttaaaatggggggaatattctttccagatgttccaacacatttagattaaagaattaacacatcgctggagggtagtccaaacatcccaaaacaaagggacagagttagcagcctagcaggtaatatcgatcgcgcatatggttgtttttacaacatttgttttgtaaacacataatatatgatactctatcttcacaggcgtgtattgttgtctcaccatatttgttctataaacacaaatataatatatgatacttttgtcaaaataggtaagacgcctattacgtattctcagtagtggtgaaaggacaagcagttaaataacatttgggcttgtttttcacatacaaggctaacaccacaactattgcaatctcaattttacaagcaaacaattcatcctaattcctcaaaaggccacacgtaattcgcatccttaaaactatttccctcaactgggccaatatgctctagactgaaactaaatgcagaccataaaggggaaccaagcgcgattcccgctccgctacccaaaaccccagggcagctagaccaattgccgctcctctacacaaaaccccagggcaaagatcatgaacaagaccggattggaataatcgcggggcggcacaagcacagaaaaacaaacaaacatgtataataccggtggcattgacggggcagcgcttgcggcactgctggccgcacttgctgggccggcaccggtcctccgtcaccaccgcgatccggctcgacctccccgacgacgacgacgacatcgccgcccgcctctcctctcgcggcggatcgatttggggatttttgcccggttcggaagctagccggaaaccgatcgatcgatcgccgcggcgcgaggaaggagaggaaatctgggagagccctaaaagtaaaaaaactactactctcttgtgtttgtttggtttgtcttgtgttgccttacgtgttggtgccttggtgggccgcgccgcactagcgaccgtgtcgcgtcgcgtgtgttgtttgcttcgcggatttgcgggacgcggggggattaatattggatttggggagggaggattagtagtataattaaggcggtgcggtgcgtatgccgtgggggttaagtttgcgcgacgtacggactcagccagcctggccccaccagctccacgctgtcctgttggagtaatctaaagtacagttgtgatttgacttttggtggtgtctgcttcttgcctggctgctgactgcttcttggctatgagtattcgttatttcatttatttaggagtactatttactaatagactgacgtgtatatagcgcagccgcgtcttaggctgaccggagcttgttaagtaaagtctatacagctagtagttagcaagcagggggctcagctccagtggaattggcgctgagctccaatgacatagcatacactgtcacctcggatagatttttagtgtcaaaatatgtatagcttggcgctgaggtttcggcctatttttacaataaatttttgacacggtctatttttcaaataagtttttcaaaagagtcaaattgtcaaaatttcggcaaaaacattctgtttaatgggtggcatatggttgataaggttaattctttactattatagaaactagcaaaaatgtctctccattgtaacaggtgaaaataataatttttactattggtaaaaactctgccaatttaaatgacaaatcaaaacaagacaaacaaaacaatagcaacacaaagccaaaatcatatatagcattaaacccatttccacttgttttatgcatcatcacacgaagaatcctttatataagttgaagcatcggtattttgattgttcaattagtgaaagtatttttttatatagatgaaaagcatttgcaaagtaacaaacttcccgcatacacaccttaaacaatgataatttcaaatatatatatatatatatatatatatatatgagagaaatttggatgagaaaaaaagaagaaggaaaaagagaaaagagagattggaaggaaaggaagaggattaggtttatcaggagaaaagaaaagaaaagtaagaaaaaacaaagagagagagaaaaagatatcgatcgggagaggggccttagggatggggcggcgagatggtgtgggctggttgggctgggctgggagagggagtataatagttattatagattcatatcgaattggatatgggtgacagacaaccaacccaaacatggatgaggtgctaaaattatagtagaaacatcttcaattattgggagaaaacaaaatgaaaaaggaaaaaagagagaaaaaaaagacgtcgattgggggaggggtgacgagatggtgtgggccggttgggttgggctaggagggggtgtataatagttatttgactcgcgtcgaattggatacggacggcgtacaaccatctcaaatatggatgacgtaccaaaactccagtggaaacatcttcaatttttataatagtagagattaaagatgttcccgtcggaattatggtacctcatccatgtttgagttggtttttgagtttgttatatgtccaattcgatttgagtctaaaataactattatacaccccaattctagcccaaccctccccctcccagctcaacccaaccggttcacaccatctaacccgcctccaaccgacgctgcatgtacccctcccccgatcgacgtctttttttcctctccctttttttcctttctctttgtttcttgtaataatcttgatcctctccatctccttccaatctcctctcttttctcctccttttctctttttcctccttttttactcttccaaatttctctcctcataaatattttcattttgaatttatgattgtttaaagtgtatatacggcaaatttgttacattataaatgctttccatctatagtaaaaaacatttactaattgataatcaaatttcaatatttggtcgatgaggtatagcaaatacacatacatcaacttatggaatagccaccgaatcgatttgtgaggctatggaaaaatgcacatatgggattgttcgtgtgatgacgcatgaagcgcgtgcaactgaattcaatgctatatatggtttctgactgttttgctattattttgtttgtctggttcgatttatagtttaaattgatggagtttttaatcaaccgtgaaaattgttttcacctgttgcaaaataacggacatttttgcagtagttataaaaaattaatttacgagtaaaaattttttatacatgtggcctttgcttttgaaaaaataatgttggaaaataaattaagataaaaaaaaattaaaactaggttttcaaaatttgaaaatattgatgcggctcataagccaaaagacggacgatggtaccgattgcagcctaaccttactcacttgaagaaaaaaaaacttttaactttggtagagtcagatcaagtggagaatataaagaaatagcatgatctttgaggggaacaactgcagtttgtccagagtcttgcctgcaaagtcctacatcagtagggcttacggcttaccaaaccgttcccgaatcccgagctaaaagctgacgatcagcggttttctagaatttcacaaaaaccatttgaaagccattgactcctttgaaaaatctggtcaaattttgaccataatttataactagtttgattttttttaacttgataagaaaatcaaacggtttgtgttctcgagccgagaattaaaggtttacattcgatcaactcaatttatatacaaactaaaaaaacatttctttaagtaaccattgatgctgcaaaattcgagatgtcggcacacccttgggtctgctatgctagtagacaaaactcgcgaaataggtaagccaatataaaatcttatagcctttttgatcgtacgttttagagctttatctaagctaaaaaaatcttcatacagaaaggagcctgtgaaacgagggttcaacctttgattgacaatggataatccctatttctcatagaagaatgactatatgaaaccattgaaatttctaaaagttttttttaaccacatcttccttttctcttcaattttcatctcatattgtaaattattgactggcggcatctttagttttgtagtaccaaacaccagttagatatatatcataaagttctacgaatcttgatgaatcaacacagagagatagagtgccttcaatctcaaagggtacctcttgaaacaaaatctacaaaagcaaaatttctaatcctggtacctcacgttcccagataatctgatgataaatatagactgccaatgtatatacatgctgattaaattaaagattgaagcatgatgtaacaaaatgtaacagaaaatcttcccccccccccttagaagctgcaacacaacattgttccatccttggggatttccttgcactttgctcaaaacaaataggctagagtaccaaaattatttcgtttattcatcccctataacctctaggctctagatagctggaccttcttctcaattgtttgtcactttagtttgtgtagcagctaatgcatgcataggccattttatagaggcgactcaataaatgtggtgtggatacatagctacattcgttgtgtgttctcgtgaaataaattgtcaatttcaggaaaacatttaatactttctacctaacaaaaatatattaagtatatattatgcactacttcagaaacacggatagttgccgattttcccaaccggcaaccacggaggcggcactgttgtgaaaataaagtaggtgttggttctggtgttggtttagaacgacacctttgaggctccacgaataaaaaaagttgtctcgatgcataaatccaacaacattcaagcttcccttcaccccgatcaatccaagaaatccaacaacattcaagaacacaaagaacactaagtcactagtcacataccgattccacttggaatcgaatcaatcatactttcctcccaaaatcaaccacaatcatcatcacataatcacaaaaggaatcatataatcacaacatcaaagaacttccaagaactttactcctgtcgccgtcggatccgtcctcggccaccgccacccacgccggatccacccacggcggccgccgacgccatcaccgctgctggatccacccacggcggcggccgccgccgccatcagatccgccgcgggagggaggcgagagggatcggagggagccgccaccgccgccggatccacccgcggccgccgctgacgctgccatcgccgctggatctacttgcggctgccatcaccgccgccaccgccaccgccgctggagggttgcgagaggggtcagagggacccgtcgccgctggatccgccagcagccgctgtcaacaccaccaccaccgcaagatccacccgccgctacaccagattcgtcgctaccacctctagtccagtcgccacatgctgttgctgcctccctcctgctgctaccgccggagagggcgttaggggagggcggtgccgccggcactagtaggtgtggaggacgctgccaccggtgctcgctggtggggagagggagagagagagagagtcacgcgagagagagagagggagagagaatgtcgcgggtggggagataaggataggcgtgaccgcgtgagtggataagacacggtcggatccgctcgattttttcgggtgctgtttttttaaaaaaaccggcacctataataaattatagttgtcggtttttacctataataaattaaagatgtccttttttaaaaaaaaggtatttatagtattaatgtcgatttttatttataactgacacttatttcttcacaaaagaaaggtgtcggtacttgctgacagacgctcgtgtgggcgggtaaaacactataagtgctggtttaccacttccggcacctatagagccgagttgtattaggtgttttgtggtagtgtggtacaatttgttttgatttgaactaattgctagaattacttccctctttgttcttaactagttacaagcacaattatttcacttgcatatttatttcagtccattgattagttgcagacgattgagtgcttgaactttccttgtattttgttctcacccaatatagcaatggagtactcaaagtcctgcaatagtggtcttaagaacaagaaataaaaaattgaataatggcatctcttattgcccattaatttaagttcgacacacatcattcttgctttgttcacttcagttcatggtatattaggcttcaggagattatgaatctgccaaaggatcactagtacaatagctatttttccgtgtggtcgaatcggtttttgcgtgtggttgttacgcccttctagaacgaagtgtctgcgaaaatcacgattttttcgtgcgggtgatgcacctgcacgtgaaaatctgctggaaaataaaaaaatcaaaacaagaaaaagaaaatcaaaaccctaaccctaatccggacgctgggagaccgctgccaccaccgccatcgtcgtcgccagctcccgacgccggatccaccgcccactcccattgccgacgccggatccgccgcccccaggcctcctcaccgccgccgacgccatcctcccctccggccgtcgtccccatggtcgccggcggaagacgcctctccgctccgccagatcagcaaggggaggggaggggagccgaagtgagagggaggggaggagccgcgcactgccactatcgctaccgcctacgcccgtcgccggatccgccgcctacgctcgtcgttggatccgccgcccccatgtctccccaccgccgccaacgccaccctcccctccggccgttgtccccgtggtcgccggccgaagacaccattcctccagatctgtaaggggagggaggggaggggaggggctgcgtgccgcagctgtcacccgccgccgcctgctgtcgccgccaggagagggaggccgggatatagagaggagaggaaggataagaggggaggagaggccaggagagagagaggagaggaaggaaaagaggagaagagaggccaggagtggagtgggacagagtgaggtgggagagagagaaagggggagggggagtaaaaaaagagggggtgcatttttgcgtgcgggtgagttaagaggcccgcacgcgaaaatcgattttttcatgtggtcctcttaaggagccgcacacgaaaatagagtatgattttcacagacacgatcagttatggtctgcatgggaaaataagaggctcctgtacaggaaaatcgttttttagtagtggatggggtacatcaaccacggttttttaagtgaggagtgttcttacattcaatatctttgattctcatattgatccgctgtcttatacattactattgttttttttaatcatctattgcttgtaacatatataaattttataaataaatattaaaaagaacaaaacacgatgtgccaagttactgtatgtacatatcatcacctcaatttcatttgtttgtgcacttcatgttcttcggataagagatggataccaacgcacatagggatttttatgctcaggcaaggctcaaaccaagatagaagtgatttcctattgagaataaaaacctgagttctctccgttactgatctggtagctagattgctatcatcagaaattggcatgagcacctactgtctcctgtgaagctgtgacaaccaatagactggtgctaccatgaatcccaatgcctaccattcccttagtagttaaactatctagagactttagccatgtgtatagcatatttcattggtgctatatatagagatgtagaagtgttgaacgcagacaggtgaaagaccttgaacaggggccacacagtgttatgccctttttgcactttgccactctaattcgttaatttctcatataagcatacactaccttttggatattgttttggatcctctgatgaaaatcacaagaaaaaaacatatgcgtcaatattagtaggacatatatagcttgagacatgttgtccttccggggaaattaaatacaataccaccttgcatttgttgtacaagacaagaccggtgatgaggacacagctctctaggcgctggtcaacatatatttcatcgtatatcatactcgctccgtttctaaatatttgacgacgctgactttatctgacgccgttgattttttttaaatatgtttgaccgttcatcttattaaaaaaatttaagtaattattaattcttttcctatcatttgattcattattaaatatacttatatgtatacatatagttttacatatttcacaaaagtttttgaataagacaaacagtcaaacatgtgctaaaaagtcaacggtgtaaaatatttagaaatgaagggagtaaataaattgttgtaaaaaactgttggtcaacatatgtttatcatagtattttgctgctctcctagggtagtgaagaaattcaattgattgaagctgcgtttatacagatttcacgcacaagacttcagatcaccaagcatttgatattaattagttggttgagttgaaaaacctcatcccaattatttttatagatcatgcgtttattttaggaagaagtgcattcatccaaatgtaaatcttgttacctaaactataatttgaaatcaatagacatcattcaatggatgaaaaattgcattcctcgtaattacacaatgtaagcatgaacaatgttctcttttttgctccttcaatttctgaaaaacaacaattttcaccctacataaaaaatggtttggtagattaattcaaaagatgtctgcatcttaggattcatcagaccttacgacagcgactcttccgggatgctcaatagtttgtacccactctccagtagcgtcatctttagctaaccatttaggtctccaagtacatatagttatatgcttgggtggggtaatgcatcagatatacaatccaatgtgtatgcactacagcacaagttttttccatcgcgtaatgtgtttcgcacattctagtaacttttttttgcagccgattgttctccaccaccgtttctggtcagttctcagtactaagcaacattgctatcagaagaaatcagcataagcacatcctggtatatattctcaaagttcaagcaacatgctactatgaattccgatgccttccattacctaatggaatatatagaactttagctatgtaaagaaaaatataggccattttacaagatgctatggatgaagaagtgataatgcagcaccatcgtagcaattctgctgaaatgttctataggctggcacaaatcctctgtacatatatagttctgaacttctgatcgagtgatgcatcagagatcagacccacaatccaatgcctgcaggtttctctttcgtgactcacatgttcgattgctggtctgcatgcagctgagttttttcctccaccacttttcctgattaatacctatattgatgtcagaagtgtcgaaacaagatttcggcaatactaaaaggggtggctatcaagctagaaaagtggatgggtttggagacaaggaattttatacagattcaggccttcttaatcaaaaagtaataccctactcctgtccggggattgatccgccgagtgtattattgatcgtatgacctgggagaaaaatcgtgcccctagaggaacccggacccctccttatataggggaaggggtccgtattacaagatacagtccatatccctaacggaatatgtaattatagataaaatacaatcgtaaccgactaggatctcggatatttccttgacatacaagtctaaacctaacccgagtcctcgtaaagatattctatctatatatggtaccctgtacccagtcggactatacatgccgtgtagatatggggtatccataatctccacagtagcccccgagacctttacagtcgatgaaatagccttctcttggaacataaagtaataatccgagtgcttcaatttcttctgtatagatctccgagtaccaaaatcaaagactatgaagggcggaaaaacaaaaaagttaggtgcatcgattagatgcacctaattaggtgtagcccccgactatgtgattagtttaaaactaaacatatagtcaaggtgcaaatatcatccaatccaaatggtcacatagccgagcagatgcgacgtttaataaaacatccagccgactgctttagctttaatattacaaaaagacataaaaaaaccagagtgaaaaacactccaaaaggtccataaacatatttgataagaatccgagtaaaaactcttaagatgatccaccaaatatgataagaatcatggcaattaacgagtctaaatagcctaggctatgaccctcaccataatcaaaataagcatataacatgctaagagaatgaccattaaaaaaccagtcatctcgaaccaacccaaacagattttgcagcctaaaaaagcttacaaaaatagtataacacttttctgtcgggtacctttttatttgcatcgtagtaattccaaggaattatctaaccgcgtcaaaaaggattttatcagcattgggccatatcgtggtgagcaaaaattgccgaagcaaaaatgcttaagtcactacagaccaccacttagccacgccggtagcagaattgggctaaagtactgttttaggcccaagcccattagtacttccgataccctaataataccaaagagaaataaaacgtctcttcgtcttccccgccgagactctcgccactttccccatttcccgctacagtgcaaaactgcgccggcgaagctagtgttcatcgatctgctccaatccatcctccaaaactccgcaaaaacattccgcgcaaccaccgcaccgattccccatccccttccagccatatcttggaccaaattacaccatccagttcatattcatggcagaagagagagaaagctttgagagtcagtgggtgccctccgatgtaacggaggagaatctgaaagagatggtggcgcacgacgttctctcggcgaaagagatcattgggtggcgcccagcattcggcgaagcgttcccgacccccgacacacatgaagtcgtggtattttctcatttcttctatggcggattttctcttccaacctcaagattcttccggagaattctgaagttctatgggattagtttgcaccacttaaacccaaactccatagttcgcattgccaacttcatacacgcctgcgaagcttttttgggcattaggccacattttgccttgttctgccgcatcttcttcctcaagctccaactgaacaagagtaaaccatgtgttgttgggggggctggtttccaacttaggggaactttgagccaaaaatacttttccatgcccttcaaaacctcaaacaaaggctggcatgcgaattggttctatgtacaaaaccctgagcctgcactccccgagtactcctgtctccctccagtttatcaggacacttggaactcactgtcgattggagaggaagccgctcaggcgctcgacctgatggaccatatgctgaagctaaaggagcaaggtctgcaaggagaacagatcactcggcattttatcaagagccggctagctccaattaaagagagatctcgtacggccttcgaattttacggcaagcatgatccaaaccatgaagatccagactctcttgattttaaggtcatgaaggagagaatgtacaagatcttctcaaacactatcgtagttagctattcgcacttgctgccag
